United States Patent Application Publication US 2019/0144922 A1 - sequence listing, part 16

SEQ ID NO: 6 - DNA, 5241455 bp, Serratia marcescens (residues 3,494,305-5,241,455 of 5,241,455)
ccgccaggagattgcgctgggctcgctgcacctgctgggcacccgcgacggccccaacgtgcgccgttccttcgatgctatccgcgccagctgggtcaaggataaaaaccgcctcgacgcctttatcggccatcccgtcacccttaaaaccggcagtttcgacgacgataccgacaacagccaaaaggtgtggggactgtacggcaccacgccgctgacgccgctggcttcttcgctcgatctctacacctttggctttgaggataacgacgcccactacgcgcagcttagcgggcaagagcggcgctataccgtcggcgcacgcattttcggcgcagcgcgggggttcgactgggataatgaagctgcctggcagttcggcagcgcagaacagcgcgatatccgcgcctggtcggcgtcggcgcacgccggctatacggtgagcgactggcgctggcagccgcgctttggcggcaagatcggcatcgccagcggcgacaaaaacggtcacgatgggcagctcaacaccttcaacgccatgtaccccaagctgccctacctgaccgaaaacgggctggtggcgccggctaacctgatcgccatccatccttcggtcaccattacgccgtggcaaaccctggccatcgatttcagctgggacgccttatggcggcaacgccgcgaggacgccttctatctcgggccaatgcgcccggtgaaaggcagcgaacagggatcgcgctttatcggcaaccagtaccaggtcgaaaccacctggacgccgagaagcgatctccagttcaaggtagcctatgtctacttcgacgtcggccacagcctgcagcaccatgccgggctgaaagatatgaacttcgtgctggcgcagggcacctacagtttttaagcatcaggcaagttaatcggtgtacgcgggccccctcaataatcccgtatccgattaatgacgacagccggcgtgcggccgcctctatgcgttacggcaatggcggctactcaccgcatttcacagataaaaagctggaaaaacagaaagataaatcagcaacgcaaatgccgcgcgccgattacagagaaatattaaataaagatttaattccaacgagttatttaaacaagtcttttactcatatcttatgtaaaagattcatataagaataactaattaataaaataattgtgtttatactgttttaactcaatcgcagtgcacaattaattcctcaccgtgattaatgataaggatatattccgcttgaacgcaatattcaagccagaccaaggaggcaagccaatgatatcacattaattatccctgattttcaaacctgtgtacgagcatatagagcgttaggtgcaatattgtcaacgtccaaaggagtttgatatgtcattagctaccgataagatttccgattatttaaccagttatgaaagaggcgatcacgcggagagcagtaaaccgtcatataccacgcaagaggtttcagatctgctgctgagaagccattattccgccaatggcaaaggcgtgacagaccatgcggctaccttgacctactctttccccgtctataccggcagcgacaagacgggcgccgcgcagcttaccgccgctcagcaagcccaaaccaagctttcattgcaatcctggtcggatgtggccaacatcacgttcaccgaggttaaaggcaacgacgcgaaaaatgcagatataaagtttggtttttataaggcggccagcgggggcaattacacctcgtatgaaagtacgcagagcgatctcaaaagcaccatctggatcagcggtaataacggctacgacgcctccaatccgcaaaccaataactacgccagggatacgcttacccatgaaatagggcatgcgttggggctttctcatcccggcaattatgatgcgtcaaatgccacctaccccacctacgccaactcggcgaagtattatgaagacgaccatcaatattctttgatgagctattttaacgaacaatacaccagcgctgactataaaggcgtttggccatcaggaccgcagctggatgatattaccgccatacagaagctttacggcgcgaataccaccacgcgcaccggcgataccacctatggtttcaactcgaatacggacagagactttctgagcgttaaagcgtccacggacaaaatcgtggcggctatctgggatgccggcggcaatgacacgctggatttttcaggctacagccaggatcagcgcatcaacattaacgaaggcgcattctctgatgtaggcggcttgaaggcgaatatcgccatcgcctacggcgcgcagattgaaaatatcatcggcggcagcggtgccgacattcttgtgggcaacgcgctgaacaatacgctaaaaggcggtgcaggcaacgacatcatttacggtgccggcggcgccgatcagctctggggcgatgcaggcgcggacaccttcgtcttccgcgcagccggcgacagccaagccgccgcaccggactggatccgtgatttccagacggcggtggataaaatcgatctgtcgtggctcaaccagacggctaaggcagaagggagcgagttgcacttcgtgaatagtttaagcggctcgttgtatgaagcggcgctgaattatgactcgcagcagaatgtcaccgatctggccatcaatctctccggcaatcaactgcctgatttccttgtaaaaatcgttgggcaggtcgacgcttccgccgatattctcgtctagccaaggcaaacccgcagtccggcgcgaacgccggactgtttatttcttttcaggcctgccgctggcgttttttgcgcggttcccatatcgccaaagcagtaaatgggtgtggggagcaacggaacaacaaacgcacttaagcagtcaatttaaatgactattaatctataaatcaataagttatcacgtcatcgccagaaatcatccgttcttctttcttgtctcagtcatcacacagcaaatgatagtcattatcatttgatatctattcctgatgctcataacctactgttcatgcatacagttttcgtaatttttaaccatcctcgccttaaatgcgcagcgtcgttaactgtctgtaaagcgttaccatgtgccatttccatggcaggaacttattaataaaccgaggaattatcatggctgaacaaaagaaaaatgcccaggtacagagtggcgtcaacgacgacatcaccgaactaaagtcgctgactacattgcgcaaacgggtcgtcagcgacggtgaaatcgtctcaaaatctgccaacggctttcgactggccaacggcaacaccggcgtgatgttgcgtaacgacggcgaggctttctacttactgacaactcaggctgggcaagctcaaaacggacaatggaacacctcgcgtcctttcgctttcagcctggcttccggcagggttgcactcggcaacggcgttgatatttccggtggtgcgatggtatcgcataatgccggcatctccaccgcgaccaccggtccagcaccacttattaatgggcaaatctatgatgcggctgccgtacataccaatttcaccagcggtaacgtcactacggccatgttgatggggtcacgcgtgatcgccggcaaagaggattatggcctgctctcttaccgcgactggcagggaaactggaacgaactccaggtcaggccgaatgccgaattgtcagtaggacaactgattaagcgtaatgctaatggatggatttgggcggccggtaaccagaatgtaaacaataatgcagaccgcattaccaacggtatgcatatacagggtgcaggcgacctgtcagccgatttgtaccactacgagcgcatcggcaaacaccacatgctcgcgttgcacgtggccaatggcggcgctgatggttggtatgaattccgcaatgatggccatgcctacaccaatggcgcctggaacagcagctcagatgtccgcatgaaaaccgatatcacaacaattgacggcgcattggacaagctggccaatatcggtggttacacttacctcaaacagggcgtgccggaagccggggtgattgcacaggaagtggaagaaattctcccccaatccgtgacccagaccgagctgaaactcaatgacggcagcgtgctgaaagacgcccgcagcatcaatatcaacggcgtagtggcgttgctggttgaggcgcttaaggaagaacgctcactgcgcgaagcagaacgagaaacttttgaaacacgactggctgctttggaaaaaggcattgaacgcgcctgattaacaatattgcagtggtttgcactaaatacctctcagcgcctttacaggcgagtaccgcgcttacaatacgatgacgaaaaggaactcaatgatgaatggatttaattacggtgatggtaaaggaaggaaacgtcaaggcggtgtaaatgcagaagctgcttcccggttcagtaatgtctgcgttattcgcagctcggcagcgcgtcgattacatcgttctatttgaagagggatcggattatgacacgatatgaagatacaacgcagtatgaacgcgatgtaatgacttcaatgggatacaactggaatggacatgggtggcaacgagggtttgacttatcagatggcaatatggttgtagaagcatgggttggcgagggtttacctgatagacagaaggaattaagtagtattacccatatctgggatcaaaaaatttccgatattaataaaccgataagtgcttttgatcctgaagatgatgatatcaggccattcagcaatgaagcgaaagagagttatcgtgaggattcggacaaagccattcagttttacgctaataaagtcaatgaaattgacaaccaaattaaagaaattcaaaaggatattgatgcattaagcaagaaagctgaaagcagtcaacttagtgaattcgagaaagcaaacctaaaagcaattattagtaagttaaaggtaagcaaagaacgtcttaccattcttcgaaacgaagctaataaaagaagagtacatcaggaatatttaaagctgaataatgaaagctggttcttctctagagagaaacctacaccctgggttagagaacagcaatcattgaccagaaaagagatgggtaacaaactggaagaagagaagagaatacaattagaaattgacgcagctaaacaaaatattgaacatttagaaagtgaacagcgcgagaaggaagaggatgtccgcaaagctgatgaggctcgtaaggctgaggaaacgcgcaaagctgaggaagcccgtcgcgctgaagaagcccgcaaggctgaagcagcacggaaagcattgttcgccaaagccggcgtactggacgccccggtctatacacccgacatgataaaagcggccaatgccgcgttggccacggccggggtcatggtgctcaaccgcgcgggcggtatggtacaattatcgacatggggcaacagtgtgatgaccaccgccagtgagctggccggctgggtatccagtgccgtgtggcgcggcgccgtcgaagtttcccgggttgccacgctcagtgcggtagctccggcagtcggcgccttcgttgtcggattctggccggggaaagtcggtgaaagtcagagcgatattgataaattgctgggccgtgatttgacacagatgtttaccgttccggccagcctggttgccgcagggaaaacacagatccagccggaaatgaccacggtcgatttgccagtgcgcgggtttattcgccgagggaataacggtcagcaagaggtaatactggtcaaaacaggaacgggcggcgtctccgctactgtgccggtgtatcggccggttcgcgatgaaaaaaccggcctggaccggataaccttgccggcggtggccggtgcgccggggcgaaccattttgataaacccgggcgctgccccgtcgggtccgtggcataccggcaatcctgcgcctgcagcgccggtaacgccggtgcataccggtacggagataaagcaggccgacagcatcgtcacgacgacgttccctgcagataacatgccactgcaggattttatctactggcagcctgatgcaacggggaccggcgttgagcctgtctatgtcatgctcagtggtatctatggtgaaaccaacgctaaagggcaatacagtggtcgcgactacaacacggacaaggccggtgggccaattcagaatctggactggaaaaccgccaccattgaccgcgccggcgtggacaaggtgaagctgcataccgggcggtttggcgaatctcccgataacaaggtgatgattgaccgcctggaaaaaatcctgaagggagcagtacagcccaccgataccgacaagcgtttttacacccacgaaatcagggaattggagcgttatagagcaattggtgttcctgatggaatatcacctgatgacgatggtgctacgtggaataacactcatacggcgacgttggaagattacaaattaagtagcgatcgctctctgttatatacaccagaagcattaaaagctggtgatgaataaatctagaggctatatatgattgattttaaacctatgtttgaaaatgaacaaatccgagacatagttttattcttgtcgggacgaaaagaaaacgggatatctcatcctcaattagatgggtattgcactatgtatggtaataaacgtatatcaaacattgaactgatttcattagtgaaaagtatgcgagaaaaaggggatgtatcatctaatggaaaaggtggctataaaagaggtccaaactggaaagaacctgcattcgtaaccgagaaaaaatacggtattgagtaattaccagtgccttccataagtgcgttttaagcagcgtccaacaaacaagagtttgttggacgttttcgttgatagctaattccacgccagattggttttcagtccagcccagggtcagaaaacaacggttttggctccgttgctccccccaaatcgcgcagacgagctcacaccgcttccagctccgccgccagggtggcgaccagctccgccgccggcatcggccgcgccaggccgacaccctgcccggcccacagcgacataaactccccgcgcccggccttggccgccgcctggcggatatcgccggtgagcgcgttctgcaccggataaggcaggatctgcgcctcttccgcgcgcatctgccgcatgaaatcattgacgatgccgcgcgccgggcggccgctgaaggcgcgcgtcaggcgcgtgctgtcatcgccggcgttgctcagcgccgcccgccaggcttcggcgatgcccgactccgggctgcacagaaacgcggtgccgagctgcgccgcctgcgcgcccagcaattgcgccgccgcgatgccgcgcccgttcatgatgccgcctgcagcgatcaccgggattttcaccgccgccaccacctgcggcagcagggccatcagcccgacgcaggattgttcgatatcgccgaggaaggtcgggcggtggccgcccgcctccgagcctgagacgcaaacgaagtcggcgcccgcctcttcccaggcgcgggcttccgccaccgtggtggcggtgccgatcacccgtgaaccggccttcttgaactgcgtgaccgtggcgcgcggcagcacaccgaaggtgaagctgaccaccggcggcgcagcctccagcaaggctgcgatctggtcgcggttgttttcggcgaattgagtggggatcggcggctcgctcaaccccagcgcttcgcggaacggccgcagcaggtgctgggcgcgcttcagttcggcgagatccgggtgctgctcattgagcagaaacagattgatgttgaacggcgcggcggtctgcgcgcggatctgctgcacacgttcgaggatcagcgccggtgaaaacagcgccgccgcgcacgatcccagcgccccggcgttgctcaccgccaccgccaacgccggcggtgacgcgccgttcatcggcccctgaacgatcggatagcgcagcccaagctcgcgggcaaaagcagaaggtgccgtcatcaatgtgtctccctgtactgactacattcgtcttacggcggccgcgccgccgaaccgaccaaaagcatagcaccttctcaccgcctggccgtgcagttaatgcttcacctgccgcctgtccaacgacaggaagtgatgcaccaccggtttctccgggccaatatggaagcgcagcgcctcctgctgcagatcggcgtcggcgtgcgacacccgctggtgctgccgcagatgctccgcccaggactccaccaggaaccactccatgatgcattccggatcgccggtatgctcggtgataccccaggcgtaagcgccatcgcggcggcgcgcccgctccagcatcagcagcgtgcgcaagaactgcgggcgatcctgttcgcggatgcggtactccacctgaatcattaccgggccgcgatcgttttcgaccggcgtgttgaccaacggttccggccaatggttcgacggctgcagatcggcctcaccggtcggcagacgcaggcggtggaacagcagccccgccgccaacaggccgacgccgccgaccagcagcgtggcggccacgcccagctcctgcgccaccagcccccacagcaggctgcccgccgccatcgcgccgttgaacaccatcaggtagatggccaggccgcggccgcgcacccagttgggcagcacgccctgcgccgcaccgttgagcgtggtcaacgcgataatccagcctgcgcccagcaccaacagcagcaccaccgccagccactgcggcggcgccagcgacagggccgccatcaccgccgccgtcaacaccgccgccagcaacaccagcccgtcggcattcagccgctgacgcaggcgcggcagcacaattgccccgaggatcgccccggcgcccaccgcccccagcaaaacgccgtaaaagccggcgctgccgcccagcatgcggcgcgccaccagcggcaacagcgcccagaccgagctggagaaggcgaaaaataccgccgcccgcagcagcaccacgtgcaactcgcggctggagcgggcatagcgcaggccggcgcggaaggcgccgaagaagtgttccgacaggccgctgtcctcaaccttcggccgcttccaccacagcagcgccgcgatcaccagcacatagctcatcacgtccgcgccgtaggccgcgccggcgccgaagctggccagcagcagccccccggccgccgggccgatggagcgagcgatgttgatgcccagcgagttcagcgccacggcgtttttcagctcggcgcgcggcaccagctccggcacgatcgcctgccaggtcggccccatcagcgccgcgccgatgccgccgacgaaggtcagcgccagcaggtattccaccgtcagcgcgccggtctgcgacagcaccagcaggctgccgctgacgcaggccagcagaatttgcacgaagatcagaaagcgccgccgatcgagaatgtccgacagcaccccggccgggatcgccagcaggaacaccggcagcgtagcggcggtttgcatcagcgccaccgccgaagggttgctcgacaggtcagtgatcaaccacgagctggcgacgtcgcgcataaagctgccgacgttgccgagcaccgtcgcgccccacagcaccgcaaataatgggattttcagcggcgcgaagccgcccgccgccgccttgttttccgtctgctcagccatctgttcgctccttcaaatcgttaaatgccaccagcaacagcgcgccggccagcccaaggtgttcaaaaaatccgttcatcatctggccgcgctccgccccgtcgaactgccagaacggattggccatcagcgtcgccatcagggtaaaaccggccagcgccagcgcgccgagccagcgataaaagccgctcaggatcagcgccgacgcagccagttccagcagcgtcaccagcacggcgaacagcgccgccggctgcaggccgaagtggctcatctcggcgaccgcgccttcgacgttcagcgctttgaccaacccgccctgaatataggcggcgcaaatggcgagcagcagcagccagcgcaccacaggcgcatgcagccgctgtgcgcagcgggcggcgatagcagtcaggttcatcgcgcccccttaaaacggcgaattttggatgaaggccagcagatcggcgttgaagcgatcgggatcgatctgcgccaaaccgtgcgaaccgccggcgtaaacattcagctccgcctgttgcataagcttagcggctttcagcgccgaggcgccgatcggcacgatctgatcggcgtcgccgtgcaccagcagcgtcggcttgtcgatcgccagcaggtcggcggtgtaatccacttcggagaacgcgcgcacacactcgtactgccctttcacgccgccctgcatgcccatcagccagaagtggtcgatcagccccgcattgctctccacctcgtcgcagtggaggccatagaacggcaccgccaaatctttgaagaactgcgagcggttgcccgccacgccgctgcgaatgccgtcgaaggccgccatcggcgtaccctcagggttgaccggcgtttgcagcatcagcggcggtacggcgccgaccagcaccaccttcgccacccgatcgctgccgtgacggccgatgtagcgcgccacttcgccgccgccggtggaatggccgaccaggatcagatcgcgcagatccagcgtttcgatcagcagggccagatcgtcagcgtattggttgatgtcgttgccgtgccaggtttgctccgaacggccgtggccgcggcgatcgtgggcgatcacgcggaatccgctctggccgaaaaacagcatctggttgtcccaggcgtcggcagacagcggccaaccgtgggagaacaggatcggctggccgcggccccaatccttataaaaaatgcgtgcgccatcgggcgcggtaagggtgctcatgacgtgttccccgctcggtatcgaattggattttgtacgggttaacagtacggcaggcgtaaaggtagtgataacggaataattttcgcatgatcgcgagtttttttgctgaagaagccggcgtcgccgccggcgcaaaacgtcagatgttttccagatcgataccgcgcgtttttgggccaaacagcccgatcaccagcatcacgatcagcatgctggcgacgataaacgcgatcacccccagcgaaccgccgtactgcaagataatgccgatgatgatgctgctgaacaccgtcgacagccggctgaaggagtagcagaaaccgacggcgcgggcgcggatatgggtcgggaagatctcggattgatacgagtggtagctgtaggtcagccaggcgttggaccaggtgatgaagaaaccgcacaggatcagccacagcgggttgttctgcagtgcgaacagcgagccgaagatcaccgtcaccaggcaggacaacacgatctgccacttgttctccatcttgtcggcgtagaagctgcacagcagcgagcccagcgggtaggccagcgtgataaagaaagcgtacagcaggctgtgggtgaccgaagcgcccttgcccgacagcagcgccggcagccagttgccgaagccgaagaagccgatggcctgaaagaaattcatcactaccagcatcagcgtgcgatcgcgatattgcggcgcccagatgtcgcgaaagcggccgcgcagcggcgctccctcggcatcgtccaccgggcgcgacgggaagtccgcggccgccacgccgcagcgccgctccatgtcccgcatcacctgccgggcctgcgcatagcgccgctgttgcaccagccagcgcggcgactccggcagccccttgcgcaccaaccaaatcaccagcgaagccagcgcgccggcgatcaccacatagcgccagccgctcagcccccaaatcgtctgcggcaccagccaccaggacatcagcgccaccgccggcaccgacagaaactgcacgaagaacgcgaaggcgaaagcccgggtgcgcaagtgcgcgggcacccactccgtcaggtaggtatcgatggtcaccaactcgatgccgagcccgacgcccaccagaaaacgcagaaagatcacccattccgcctgctgttgaaacgccaacagcagcgagaaggcgccataccagatcagagcgaacataaaggtggcgcgccggccgaagcgatcggcgtacgggctcagcaggctggcgccgacgaacaggccgagaaaggtggcggaggcaaaggccgcctgatccgacacgccgaaaacgccctgcgcgccggtgtggaaaatgccgtcggcgataaggccagtgctgatatagccggtctggaacagatcgtagagttcgaaaaagccgcccagcgacagcagaatgataaagcgccacaggccggccgacgcgggcaaggcgtcgattctggccgccaaatcccgcgcatggatcggcgacgccgctacagattcactcaccattaacctcgcattaacatttttgatgactttctatgctagcgaagcggcgtcggagttaaatttttaattagcagactatgaaaaaaagttaagcataaaacgctgcagcagcctgttttatagcaggaaaatgtagcgcgggatgccacagcggcatcccgaatcggcaggttaacggctgtggtggtgctgcagccgttcgctgcggtagacgctcaacaggcaccagccgagggcgatcagcgccagcggcgcggcgacgaagccgatgttgcccatgcccagatgcaggctcacctggttgcccagcagcgcgccgctgccgatgccgaagttgtacaggccggagaaaatcgccatcgccacgtcggtagcgtccggcgccaggctcagcactttggcctgcatcgacaggccgatcgccatgatcgccatcccccagaagatgcacagcaccgtcaggtggctttcactgccggccgccggcaacagcagcagcaggctcaaggccagcagcgtgatggcaccgatgaagaagccggaaggaaaccgctcgctgtagcggctgaacagcaggctgccgacgatgccggcggcgccgaacagcagcagcatcagcgtggtgaagttctccgacagcccggccacggtctggataaacggctcaatgtagctgtaggcggtgaagtgcgccgtcaccacaatgatggtcagcatgtaaagcgccaccagcgccgggcgcttgaacagcagcggcacgctggccagcgaaccggaatgctcgcttttcagcaccggcagcaggcgccacagcagcaccagcgccagggtggcgcacaccgcgatgccgataaaggtcatgcgccagccgagcagttgcccgaccacccgcccgagcggcagcccgagcaccatcgccagcgcggtgccgcccgccagcaggctcagcgcctgggctttcttgcctggcggcgccacgcggatcgccagcgaggcggtgatagaccagaacaccgagtgcgccagcgccacaccggcgcgcgaaatgaccagcgtggtgaagttccaggccacggcggtcagcacgtggctggcgataaacagcacgaacacgccgatcagcaacttgcggcgctcaatcttgctggtcagcagcatgcacgccaacgaggcggcggcgacgatccaggcgtaaatggtaatgatcaagccgacctgttcggtttgcatcgagaagctggcggcgatatcgctcagcagaccgaccggaataaactcggtggtgttgaagataaaggccgagacggcgaggataaccacgcgcaaccaggcggttgagcgcgaaacgggagcgtgttccatggtaaacaaaatccggacaggtgcgggcaagtcgcgatattttaaccaaccggcccgctaaatgcgatatacgtcacactttaattgtgtggtttttttcaccgcccatcgacacgctcaccgacgcacggttgccaaaatgctgtgctaatctattgaagcgtaccaatttttcctgccgttcttcccaggccgtccacgcgccgcgccgaagaagcgcgcagtgtccctttggcgtttcctgaggcgaggtcattatgatgtccgcgatttatgattggtccgtgctcgcattgcgcaatgtttacgatcgccgcattcagggcaagccggtgctcgacagcgccgcgctgttccccgacgccgaacgtttcaccgcccaatggcggcagatccgcgaagaggcgctgaccgtcgcccacgatctgcacaatattccccgttttcacgagatcatgagccagcaggcgtcgatctccgccaacgacgcgcgcgactggcgcatgttcatcatgaaggcctacggccagcccatcccccacaacctggcgcgctgcccgacgctggcggcgctgatcgcttcgtcgccggacgtgctgtccgcctcgctctccttcctggcgcccggcaaacaggtgccgccccatcgcgggccgtttcgcggcattctgcgcggctatctggtgctggacatgcccaaacgcgccgacggcgcgccggcggcggtgctgaaagtggacggccgcgaataccggctgcacgagggggagttcatgctgtgggacgataccttcgaacacgaggtgtggaacgacagcccgcaggtgcgcaccgtgctgctgctggacatccgccgccgcgacatgcccgccgggctgcggctgctctccagcgccatcatcgcgctggtgcggctgaacgtgcgctggatgcagcgccagttctgactgcggcgctcaggcgattaaccgccctgagaagccagccactgctcggcggtagtggtggctatgccctggcgcgcattgaaggtttttgccttatcccaggccacgccgtcgggccgggcgaaagccagccggtatttggcgccgacatcatgcggatgattgcgcacctccgcctgcagccgctctttgtccaacaggatcctgttgacctccacgccccagtgcgcctgcataagatcggcaagctcgcggtaggtcagcgtgtcgccggcgatatagaccacctggttgcgaaacgcgggccgatggaaaaaaatcgcggccgtcagccggccaatgtcctcaggggtggtcagcgtcaccgcgtagcgccagtcgcccagcgcgcgcaccgttttgcttgccgcatccaccacgccaaagccggggtcaaacaggtagctggtgaaaatgcccgtggaaacaatcacccactccgtcgccttctgcgcacgcagcaggtggcgcacctcaagctgttcatcccacacctgttgcccgctgcctttacccacgacatcgtagtccacgccgaactgccacgggaagtagcgcgccacgcccgccagcaagacggcctgggtgatctttacctgcgtgcccgccccgccgacaaagccgctgcagttgatcaccgcgtcgaaggaacggaatagcgcgctcagcgcctccacgccgttttgctgcagatcgccttccaccacggcgatgccgagccgcgccagcgcatcccgccgcgcccggagcgggccgctcacggcgcgtgcagcctccggccggagcagcacgctgatttttaaagatggagataaccgagcctgccggctcatcgcacgcaataccggcagccccagttcaccggcgccgagtatgagcacggcattgatagatggatttgtggatttcattcttgcctcctgtcttgacactgcgtcatcctgacagctgacaaaaacgggttcaattaggtacacgcgtgataccggagaggaatatgacgagcgatcgggaagcgctgctgcaattttcgcaggcgttctgtgaagaactgagcaacgacgatgaagggttgaagcgtgagatcctcgcgcatgcgggcaaccgttggtcgctgggggtattgcatatcctgggcactcacgggccgctgcgccacggcgagataagccgccaactggcgggcgtgacgcagagaatgctgacgcggacgctgcgccatctcgagcgggacgggctgatatcgcgctgcgattatcaggagaaactgccccgcgtggtttacaccatcaccgacgcgggggaagagatgctgctcaacatgctgccgctctggtcgtggattatcgcctccgccgacgccttcagagcggcccgttcgcactacgatggccaagagcgcaacgccgctgaaaaatgaacgcgggcatccctgcccgtggggcggcgctcagccgccgcccagataggcctttctcacctccggatcgttcaacagttcttccccgctgccggtgaggcggatctggccgttgaccatcacatagccgcgatcggacagtttcagcgcatggttggcgttttgctccaccagaaacagcgtcatgccgctgcgggtcagttcgcgcagcacgccgaagatctgccgcaccacgatcggcgccagccccaggctcggctcgtccagcagcaacagcttcggccggctcatcagcgcgcgggcgatcgccagcatctgctgttcgccgccggacatggtcatcgcccgctggttgcgccgctccttgaggcgcggaaacagttcgaacatgcgcggcaagtcctcctccaggtagcgattgccgacggtgatggtgcccatcagcaggttctcctccacgctcatgtccggaaagatgcgccgcccctccggcgcctgcgcgatgccgctgctggcaacaaagtgcgtggagcggcggctgatgtcctcgccgcgaaacaggatctgtccgccggcgatgcgcggctgaccgaagatcgacatcaacagcgtggacttgcccgcgccgttggcgccgatcagcgccaccgtctccccggcgtttacctgcagcgacacctggcgcagcgcctggatcggcccgtaaaacacatcgacctcgcgaaattccaacatcgcttcgctcatcccgccagctcctcttcgtccgcgcccaggtaggcggcgatcaccgcctcgttgtgctggatctcctgcggcgtgccgcgggcgatcacatcgccgtgatcgagcacgatcacccgatcggagatctccattaccatgcccatgtcatgctcgatcaacagcaccgtgatgccgtgatgctgccgcaggaagcgaatgatgcggctcagcgtggccgtttccaccgggttcagcccggcggccggctcatcgaggcagatcatctccggcgcggtgcacatggcgcgcgcgatctccagccgccgctgctggccgtaagacatctctcccgccagccggttggcgcagctcaccagatccaccacctccagccagtagaaggcatgatcgagcgcggcgctctccgcccggcggtagcccggcgtattcagcaccccggcgatcaggttacggttgctctgcatgtgctgcgccaccagcaggttctccaccaccgacatttcgcggaacagacggatattttggaaggtgcgcgccagcccggcgcggttcaccaggtgggtgccgccgaacatcttgtagtagaggcgcgaaccgagccgctttggacgtatccagtcgccggcgcggaacttctgccccagcacctggatcacgtcggtcggccgcttgtgggtattgagcaggatcgcgccgccgctggcgcggtaaaagccggtcaggcagttgaataccgtggtcttgccggcgccgttggggccaatcagcgcggtgatggagccgcgttccacctccagattgacgtcgttcagcgctttgatgccgccaaagtgcatcatcaggtgttccacccgcaaaatggcgtcgctcatggcgccacccccttgcgttcggcgaagctggatcggctgatgcgcaccagcccgcgcggccgccagatcatcatcgccaccatcagcacgccgaacagcagcacccggtattcggcgaagctgcgcagcagctccggcgccaccgtcagcacgaaggccgccagcaccacgccgagggtggagcccatgccgcccagcaccacgatcgccaggatcagcgccgactcgaagaaggtgaacgaagtcgggttgacgaagccctggtaggtggcgaaaaacacccccgccagcccggcggtggaagcgccgagcataaacgccgacagcttcaccagcacgtgattcagccccagagaacggcaggcgatctcatcctcgcgcagcgcctcccaggcgcggccgatcggcatgcgcgtcagccggtgcttgatatacagcaccagcagcaccaccaaaaacagcaccgcgtagatgaaaatgaacttgagattcgggttgtaatcgatgccgaaaaactcgtggatcggcaccccgccgtctttggcgcgccggccgaactccaggccgaacaccgtcggcgccggcaccgagacgccgttcggcccgccggtgagcgacatccagttgttcagcaccagccgaatgatctcgccgaaccccagcgtaacgatcgccaggtagtcgccgtgcatgcgcagcaccggaaaacccagcagtgcgccggccagcgccgccatcagcgcccccagcggcagcatcgcccaaaaccccagcccgagatattggtagcccagcgccagcccgtaggcgccaatggcgtaaaacgccacgtaccccagatcgagcagccccgccagcccgaccacaatgttcagccccaggccgagcagcacgtagatcaggccgaggatcgccaccgtcagcaggtatttggtggcgacaaacgggaacagcagcgcgatcgccgccatcagcggcaggatccagcgcaggttggatttatagcccagcggccgcacgtaaacgccgtcgttgccgccgtcgaagcgcgccaacaccctgcgccccggcgcggtttgcaggaacaggctcagcagcagccgcccggccatcaccgcgacgatgatccataccagccggtgcggctcgaagttaaagctgtagccattcagcacgatgccgacgatcggcccgaacacgatcagggcgatcagcccggccaagacagcgtccagcaggctgcgtttgacgttcagcccgccgttgattacggattgcgacatggcgttctccttaaaccttggcgatcaggggccggccgagcaggccctgcggacggaagatcaggatcgccaccagcaacccgaaggagaacacgtccttgtaatccgaattcaccatgccggcaaactgcgcctccgccacaccgagcagcagcccgcccagcatcgcgcccggcagcgatccgatgccgcccagcaccgcggcggtgaaggccttgatgccaatgataaagccgacgtaaaaatcgaaggtgccgtagttcatggtgatcagcaccccggccaacccggccatggcggcgccgatcacgaacaccagcgagatcacccgatcggtattgatgccgagaatcgaagccattttgcgatcctgctgggtggcgcggcagatgcgccccagccgggtgcgctgaatgatgtaggtgaggatcgccatgccgagcagcgacgccaccagaatgaacactttggtgtaggtgatctgcaccacgccgccgtcgaactccaggcggaacacgccgctcagcagcgtcgggatgccctgctggcgcggcccctggcttatctgcgcgtagttttgcaggattaacgacatgccgatggcggagatcagcggcgccaggcgggtggagttgcgcagcggcttgtaggcaatgcgctcgattacccagccgtacaccccggtgatgacgatggtgaacaccagcgtgccgaggatcagcagcggaaacgagtgcagcccgaagaacgacagcagcgccaaaccgatggcgcacaggtaggcggagatcatatatacctcgccgtgggcgaagttaatcatgccgatgatgccgtaaaccatggtgtagccgatggcgatcaggccatacaccgcgccgagggtcaggccgttgatcagctgttgcagaaagaatacatccataatgagcagtctcgcctggtaaggccgccaacgcagtccgacgcggcccaaaggtcatcgcggaacgggcgcgccaaggcggcggcccgtcggtcatagggtcataacttcacggttaggccgtttacagttggtgatatttgcccttgtcatcccattgatagaccacgtagtccgagaccttcagatcgcccttctggtcccaggctttcttgcccatcacggtgtccacgtcgtgtgacttcagccattcggcggccttggcgctgtctttgccgccggtggcgttaaaggcggcggcgatcgcctggatcgaggcgtaggaatagagggtgtagccttccggctcaaagccgctggcgcggaacttggcgatcaccgccttgccctccgggatcaggcgcggatcgttgccgaaggtcatcagcacgccgttggtgtactgcggcccgccggcggcggtcaccagctcttcggtcaccacgcagtcgccggagaagaacttggcggtcacgccctgctcgcgcatctggcgcaccagcggcccggcttccggatggcagccgccgaagtagactacgtcaggcttgaccgaggcgatcttggtcaccagcgcgttgaagtctttctcaccgcgcgacagcccctcatacagcacttccttgaccccgcgcttgttcatcgccgccttcgctgcgtccgccagcccctggccgtaggtgtctttatcgtggatcaccgcgatgcgcttggccttcagcgtatccaacatgtagttggtggcgatcacgccctgctgatcgtcgcgcccgcacatgcggaacatggtcttcatgccgcgctcggtgatctgcggattggtggagccgggggtaatggcgataatgccggcctcgtcatacacctcggaagcgggcatggtggatgaggaacagaagtggccgaccaccgccgagaccttgtcctgatccaccagtcggttggcgaccgcgaccgcctgcttcggttcgcaggcgtcatccccctgcaccagcttgattttttcccctttgatgccgccggcggcgttgatgtccgccgccgcctgcgaagccccgcgccaatactgatcgccataggtggcgttcggcccggagaacggcccggcgacgccgatgacgatatcggcctgcgcggaaaaagccgtacctaaacaaccgatgagcaaagcagcgagcggactttttatcaatttcgatgacattgttatcttcctcagcactgttgtagcgaaacgccctggggcgcggatcagtcactttatgtgtagacggggaaaataattttcttgagagcgcagtcgcattccccaaaaatgggtaagcaaaaatccagccattgtgacgacgaatacatattgtttgcttattcatcctacatatcagttgcagcgcggcgtgtagcggggataaccgagagtatgggcagtgcggctagcatgagagggagaacggccctgcaccatcgccgtgcaaaggcttgtgcaatcgttgtgggccgcaaaatcaccgcacagcgatggaaaatgccgaaaaacagcgcaagatgttcattccgccagcaaacgcgctttttttgcagtttagcgctttgacaaaccccaggcaccccgctattattcgccccgttcacacgattcctctgtagttcagtcggtagaacggcggactgttaatccgtatgtcactggttcgagtccagtcagaggagccatatttagaaaagcccgcttaaggcaacttaagcgggctttttgcttttcgggttataactcgctgcaagagagggttcattcatccaggaatgacgaccggttacctggatcgctaaccggtgtttcaatagggtttacggtgcatgtcagcacatcatcaccgccccagggacaacatgacaatggcggttcagctcgggaaccagcctggggtattttgaatcgcttgccacagtttatgtgggatctgtaattcatccggatcttgcgacaaattgagtttgacgttcatgcttccttcatggcctgattgtactctctccacccattggggattcataaccatcgcgcgtcccaaagcgaccatggacaatccggcatccagcgcttgccgtgccacgtccgacgacgtgatttttccggcggccagtatcggtaaacggccgttattctgctcaatgaaccttgccagcgtacccttttcatcatcgtcatcccgaggggtgtccgtcagtacatggtgcagcgagatgtgcaaataatcgataagcgcctcttccgtcaattggttcgccaacgccagagaatcatctatacgcagtcccttttcgctggattcttccggagacaaccgataccccaataagaaaggctgcgtagcatggcgttcgataactcgccgaacttcgcgcgccacttccaatgggaaacgcatgcgattctctagcgaaccgccccattcatccgtgcgctgattgaaatacggggagaaaaagttttggagcaggaaaccatgcgcgccatgcaattccacgccatcgaaccccgcctcaatcgcgcggcgagtggcttcgccaaaatcgcggatcacagtcagaatttcatcatggcttaacgcgcggccggcttttttgccatcgttaaacgggcctgccggtgcggctagcgcactggcgctaacgagctcgccatcggggatcaaggccggaacggctttatttcccgcgtgaaagagttgcaggatcgccggcgcgccgccgcttttagcggcatccgccagccgtttcaggctcggaataaagcgatcgtcataggccgcgaactcatgagtaaacccgatgccatttcgctgtacatgggaacagcctgtcagcaccaacccaacaccggtcgcgcgtgcccgataataggctaactccgcatctgaaatagtttcatcatcattggctgaccaggtggtcattggggccatcacgatgcgattacgcatctcaagaccgtttttaaataaaaatggctgcattaatggatctttcataactctctcagcatttaacattttgatctaaaataaaaaatcataaaaaatcacttcgccagcggggttcccagccagcgatcatcgataaattgcagcatctgttccggtgtgatttgctgcgtcattcgccctcgcagcaccgtgcgatgctcgaaagttactgctccccgtgcaagcacctgggctttaaaacgcgcgatatgctcgtccgaaaagtggctgttgtgggtattaaacaggatgacccgtttaccgctgaaatcgctgttctcaataaaagcccaaatcggcggcgccggactgtatagccagatcggcgagcccaaccagagggtgtcaaacggcgtcaagtcaatcttggccggcgttatctcgggcaacgcatcctgccgctctttcagcaaagtggcgtctttcagcgcatacgccagccccggcaagccaggggcatagttcggcgcatcaagcctgaagagctgtgcatccaggcggtgagcgatatggcgagcggccagcgccgtattccctgaacgagaaaaataaacgacggcggtacgcgatgcgttttctcctgaatgcgcatgaggctctatcttggccaactgggcggcttgtcgattttcaatcagcgtgacagaggccaatacgcccaaaatggccagcaaaacgaccgtcaaaccgatgagggttccatacataggtaagcgccttgatgccattaatcaaaatcggtcgtcttgctgagcgcctcaaactcccacgtttcttcaatgcgggactgcaacgtcggcatgacgaaatcgatagcatcattaccgattaatagctggcgcggaggcgtgtccatttccaccaaccggcaaatcacctgcgcaagtttggcaggatcgccctgttgctgaccatcggcggatgccagtagctcgcgcgcgctgccaaaagcggcataatcggcaatgcttctttccccgtaccgggcagaactgtcattgagaaattcggtgcggaaaaagccgggctcaacggcggtgacggtaattccaagaggcgcgacctcatcagccaacgccagggtcataccttccacggcaaacttcgacgcggaataaaatgtggcgttcgcgacggcttttacgccggcgatggaagaggtgttgataatgcgcccgttccgctggcgccgcatcaccggcagcaccgcgcgcaatacattggccatgccgaaaacgttggttgaaaattgctgctctatctgttcggctgtcgcttcttcaaaacgccccaacagacagaacccggcattattcactaatacatcaatgcggccaaaacggctcacggccgcatctgcagcagccagcgcctgatgttcatcacgaacatcaagctccagcagctcaatcttttccgctgcaacatcgctgaatgtccggcgcaatttttccctatcccgccccgttgcgaccacacagtctccctgttgcaacgcagccctgacaatatgggcgcccatgccgcgcgcggcgccggtgacaaaccaaatgcgattcatatctgttcaccttaatcggtttaaaaactcgtactgcctcattgcagtacgaggtgtcgaggcactaaagcgtcaattgcaaactagggcgtatcacgatgtcatcgagtaatacgccgggcggttgagcaaatgaatagaccaatgcacgagccacatcatccggcatgagagcctgaatggcatcacgacgttcgcgcatcatgtccgcagaaacattgtgtccccattccgtatgcaccgcccccggatgaatcaatgacacgcgtatccctgcttcagccagctcctgccgcaagccgtcacagaaccccctgactgcaaatttggtggcgcaatacacggcccagttaggcgcgctgcttttccccccgacgctggataccgtggagatcattgcgccggggcgatttttcatcagagggatagcttcgtaggaacagttcaacacgccgtacatattcgcattgatctgctcctgccagccctcgggtgagctctcctcgaaccggccgaaaatccccatgcccgcgttgttgaaaagcagatccacaccgccgaagcggctcttcacctcattaaaaagtgaccggacctgagctaaatcagcaacgtcagcgtcaaaggcgacggcgcccccgcccagttcggcagccaggcttccgattcgctctttgcgtcttgctaccagcacgaccgaaacgccttccgcaaccaatcggcgggcggcagcttcaccaataccgcttgaagccccggtgataacagcgactttgccgctgagactgttcatctccatcgtcctgcctctatagaaaaattttatggcgggtgtttacataaaatacggcttgtcaccgtcagtgcccggctggttgacgccgatgttttcacccagatgttttttcggttgctcgatgatgtcggcaactaaagcggcgacgctcttgcgcgatacgatggttcctttgaacggcgcatcgcgggcggtaagctcatagtcaaccaggtcttcatccgttaaccaggccgggcgcagaatggtgtagtccagcccggaggcttcaatcgcgtcagccgcccgacgaaatggcttgaggggctcaccgatgatcgcgttgttccattcaccgaattttcccgggacctcatcataaatccccagcgaaagaacgaagatcaggcgtttgacgccgctggcctgcatggcggcaatcaccgcctcagcctgcacatccagatcctctcccgtcaggttggcatacaccagatcctggccctgcatcgcttgttccaatgcggacgggttcaacacatcgccgataaggatccggccgttggccgggcgcgaccggattttttccggctggcgagcgaacaacgtttgcacaagcgactgttcatccgccaatctgtcgataacatggcgggcgatttggccgccggcgccaaggatcaatacattcttcatggtgttctccatcggttattcacccaggtgcgcggccaaaaacggcagcaccttgtccatcgctgcgcgaacggcttccggtttgtcatacagctcgtaatgtgaaaagtccgctaacgagaccagctcgcgatgcgctgaagccgttgcgcgcccatagacttccatgccatcgcgataggcgccgaaggcaccgactttctcgcccaccaccaccatcaccggctgagtcagcagcacctcggtaaaggcgaaggcatcccaggccagcgttttttgcgcatgcgagaacaacatgcgcgtcgcgccacccggctgttgaccgcgcgcggtcttgtaatagtctgtcgcttcgaaaacgtcgcgttcggtgagcccatgggccgttgcctcttgaggactggcaggcagcagttcgttgacctgaagctctccgccccgcgcttcccgggtgcgctgcgcagccatcgcattcagcgcacccagcggatcgtagccgctgaagccttcgcggaagagtcgcccaatattaacgccggtgatgctcaccacggctttgatgcgtttctctgtcagcgtggcattgacggcataaccgccgccgccgcaaatgcccagcacgccgatacgctccgcatcgacatacggcaaggtgacggcatagtcgatgacgcggctgatgtcttccacccgctgggtcggatcttctatccagcgcggcgccccgcccgactccccctgaaaactggcgtcataggcgataacgacgtacccctgctccgccaacgccttaccgtaaacattgccggaggtttgttccttgcagctgccgaaaggatggacgctgaccaccgtcgggtagcgcttggattcatcgaaccccggcggcagctgaatgtgggcggcgatgtgccaggccatatcggcgttttggatgcgaacatttttcattacagcgtctcctcaaagaacggcgccaagacggaaacggcttcggcgacataggctttaccgtcatacaattccatatgattcgcgccttcgacgatgtggtaacgcttgtcgctgctcgcggcgcggtcgtataaatcgtcactcatccatttactgcccgccacgctgcccgccacgatctgcatcggctgggtcagatacacttcggccatatggtaggcgtcgtaggtaatgatctggttgaggctgcgcagcgtcgcatagccgggcgccgtcggatattgcgcgcgcggggtgtggtaatactcccaggcctggcgcagctcttcgttcggcgcatcggattctttcatcggcgccagcggcatggtggcatgttcaccgctgctgatatcgccggtgcgggcgttggagcccgcctcaacgtacggcagcgcatcaatggacttcacattgttttcccacccgttgcggaacatcgagccgatattgacggcgctgacggtgccgatggccttgatgcggcgatcctggatcgcggcgttggcggtatagcccgcaccggcgcaaatgcccatcgcgccaatgcgctcgttgtcgacataaggcagcgtggtcaggtaatcaatcaccgcgctgacgtcttcggtgcggatataagggttttccaactgacggggttcgccgccgctttccccctgataagaggcatcgtaagccacggtcacgaacccctgctccgccagttttgcggcataggtgccggcggtttgctctttcacgccgccccccgggtgagaaacgacgatggccggatactgacggcccgcgtcgaaggccggcgggaagtagagcactgcggaaagatcgatggttgggttattgctattcgtgaagctgattttctggttcatcatccggttcctcatcagggtggtcggttaactgcatcgtttctgattctcactatagacattgaacattaagatgattagacccaaaataatgattagacctatcacttaaatgattaattagccgaacggaaaacagagatgaaacgtgatgagatagccgatttggtggcatttgtggtggtcgccgaggagcgcagcttcacccgggccgcggcccgcctgggcatggcgcagtcggcgttaagccagatcgtccgccgcatcgaagaacggctggggtttcgtctgctgacgcgcaccacgcgcagcgtagtgcccaccgaggccggggagcagctcttgtcgaccctgggtcccatgctgcaagacctggattccgtcatgacttcactgggcgagctgcgcaaccgcccttccggcaccatacgcatcaccacggtggagcatgccgctaaaacccttttgctgcccgccatgcgcatgctgctgaaatctcacccagaaattaacgtgcagctcatcatcgattatggtcttagcgatgtggtcgcagaacgtttcgatgccggcgtccgtctggggggagagatggataaggatatgattgccgtgcggattgggcctgatattccgatggcgatcgttggcgcgccggattatcttgcccggcgaggcaccccgacctcggtggcgcaactggtcgatcatcaggcgattaacctctatcttcctacatcgggcaccgccaaccgttggcggctcatgcgcgggggacgtgaagttcgggttcgcatggaaggtcaactgttgttaaacaccatcgacctgatcctggacgccgctctcgacgggcacggcctggcctacctgccttgcgatcaggtgcagaacgcccttgacgagaaaaaactcgtccgcgtgctggacaagttcaccccggacttgccggggtatcatctttactacccacaccgcaagcacccaggatcggccttttctttgcttatcgatgtgcttaggtttaacgacgcgcagaagcccaaatagcgtgctgccgcctgcatccactccgacaggcacaggtatcgtctcctgtcagagaaactctggttgagaaaagcccgctcaggaagacctgagcgggctttgtgcttttctgccgttagcgcttacagcacaaattcgtagtgcgaaccgtccggcagttcgacatccaggcgcagtttgccgccggccgcctcaacatagcgtttaagcgaagacagtttcagatcgcggcccggtttttccatcacggcgacggtcggttgccggatacccagcacctgcgccatttcaacctgggttttctgcaccttctcgcgcagctcggcaagatggatgttcagcataatgtccgtcgccattgcctgcgcttcggccacgacctcgggcttttcctccgcaataagctgttccagcgttctgcccatcgcgtcactccttctcttttagtgtgttcagccaattcgtgaattcccgatcggcaatctgcagcattcgatcgtaaaaacgtttttcatcgcccgctttattgcccgcgcaaagcaccatgccgacgcggtacggatcgaaggcgaagaatgcccgcaacggttcgccacggctctgaatacgcagctctttcatgttgctgtaacgcgagcctttaaccgtatcggcatagggtctgggcaagccgggccctttttcccgcaggaccatcaatgcagcaagcacgcaggcccggtcggcatcgctgagtgatctgaaccaatgatcaaatgcatccgttgttttaatttcccacacgggccccctaaaatatagatcaatagctatatagatgtaaagctatagcagagaggcattgggatggcatgcaaaggcatgcgttgttactgcaaggctgaacgtacatccacgcattttgcaaacgcagtgcgcggcattcacctttttacgcgcggtatcgaataatcgttcagaggcacggggcgcttccccgccgcccctttatgaaccctgtcacaaaaagcgcataacgttttcggcgttctgcgcagcgggcgatgagcgacaaacttgttaacgccacgttacatcgggttaggcaacattgttaacgccgactgatgcgtcaaacgcatcgcgccatgcgtttattgcgcttatttactttattttcctgagcgagtcttcagcaacaggcgcggcgtcaagcgccaataacaaactggagataacgatgcattcctctacctcacccatgaccatccgggccagatccggcgcgatactgcgcgtcacctccggcaactttttagagcagttcgattttttcctgttcggcttttacgctacctacatcgcacacacctttttcccggccagcagcgagttcgcctcgctgatgatgaccttcgcggtattcggcgcgggctttttgatgcgcccgatcggcgccatcgtgctgggcgcttacatcgataaagtcggccgccgcaaagggctgatcgtcaccctgtcgatcatggccgcgggcaccttcctgatcgtattgatcccctcttaccagagtatcgggctttgggcgccgctgctggtgctgtgcgggcgtctgttgcaaggcttctcggcgggcgcggagctgggcggcgtgtccgtctatctggccgaaatcgccacgccgggccgtaaaggcttctacaccagctggcagtccggcagccagcaggtggcgatcatggtggcggcggccatgggcttcgcgctcaatgcggcgctggaagaaagcgccattcgcgaatggggctggcgcctgcctttcctgttcggctgcctgatcgttcccttcatattcttcctgcgccgcaagctggaagagacgcaggaatttaccgctcgccgtcaccacctggcgatgcgcgacgtgtttaaaaccctgctgaaaaactggccggtggtgatcgccggcatgctgatggtcgccatgaccaccaccgcgttttacctgatcaccgtctatgcaccgaccttcggcaaaaaggtgctgctgctcagcgcctccgacagcttgctggtcaccctgctggtggcgatctctaacttcatctggctgcccatcggcggcgcgctgtcggatcgtttcggccgcaaaccggtgctggtcgccatgacgttgctgacgttggccaccgcctacccggcgctgagcctgctcgccgccgcccccagcttcggcatgatgctggccgtgctgctgtggctgtccttcatttacggcctctacaacggcgccatgatcccggcgttgacggagatcatgccaacggaagtgcgggtggccgggttctcgctggcctacagcctggcgacggcggtgttcggcggctttacgccggtagtctccaccgcgttgatcgaatacaccggcgacaaggcttcaccgggctactggatgagcttcgccgcgctgtgcgccctgctggcgacgctgtatatgtatcgccgcatcgccatgccgctgcaaaccgcgcgctaagccgccatctcaaaaggaatgatgccatgcaaaaactcactcgttcgatcctcgccgcgctggtgtgcgcctcctgcagtacggcggcgctggccaaagacgtgaccgtcatgatctccggcggcttcaaagccgcactagagaagctggctccggaatatgaagctcaaagtggcgacaaaatcattctggtgtccggcccctcgatgggcaaaacgccgcaggcgatccccgcgcggctggcgcgcggagagcaagccgatgtgctgatcatggtgggcgacgcgctcacccaactggaaaaagagcgctggacccagccgggttcacgcgtggagctggccgattcgccgatcggcatggtggtgaaacagggtgcgcccaagccggtgataaaaacggatgccgagctgcgcaatgtcctgctgcaggctgactctttcgcctattccgacagcgccagcggccgctatgtcagcggccaactgttcaaaaagctgggcatcgaggaacaggtgaaaggaaaggcgcataaggttgagcgcattccggtggcctctgaagtggcgcaggggaaatacgcgctgggcttccagcaggtcagcgaattgctgcccgtggcgggcgtcacctttatcggcgagctgccggaaaacgtgcagtacatcacccgcttcgcgggcgcggtgaccgccaaggcagagcaccgccgcgaaggcaaagcgctgctgaacttcctcgcctcctctcaggcacagccgaccattcgcgcgaccggcatgcgaaccgtgacggcgcagcagccggtcaggcagagtgatactgttcagtaatcagcttttccagctcggcggcgacgaaagactgcatgcggccgccgcgtctgatgagacccacggtacgtttcaccactggatcgaccagcggcaccgacgtcaacaccgagtgctctgaagcgggcatcgacatggcgggcacggcggcaatgccgatgcccgcctcaaccatgcccagcatggtcgtcacatggcgagtttcacacacgctggggcgttccggcacgaggtgttccaggcgctgatcgagcagattgcgattgccggaggttttatccagcgagacgtaatcctgctgatagaactcttgccaggtgaggctctttttagcggcgagcggatggtcgcgccggcaggcggccacgtagacgtcccccaccaacggcacaaattcaagattaggctgcagccgcccggcgaagcagatgccgaaatcggcctggccgccggtgaccgcctcgatgacatgacctgcgctgccgtcgatcagcttgacgcgcacgcgcggatagcgcagccggaaacggcgtatcacgtcgggcatgaaatagtaggccgccgagggcaccgtggcgacggtaaccagccccacccgctcctggctgaccttgtcgatatcggccaacaccgcttcgacgttcatcagcagctgatccgaacgctcggcaaaagcctgcccgtacagcgtcaaggtcacgcgccgggtggtgcgatcgaacagtttgctgtccagcgcgttttccagcttctcaatcctgcggctcagcgccgactgcgacaggcagatggactctgcggccagccgaaaattgccgtactccaccagcgcgcgaaacgcatagagatcgttgagatcaaaattcacgggcataacgaccaactctccttgctgaaaatggcagaagacgcaaaacagcgatgataaccgcttatatcgccacgttcaccgactgggtggttgaaccacccaagcccctatcgccccagcagcaccattccccaaataatgatagtcatcaccacggctaccagctgcgctgcgccgcccaaatctttggcgcgtttggataacggatgcaattccagcgaaatgcgatcgactacggtttcaatcgccgtattaagcagctcaaccaccaatagcagaaaactgcaggtgattaataacagcctttctatatttgtaatatctaaaccaaatgtaacaaccagtaaaatggcgttaataaccaataattggcggaacgcatcttcggtaagcacagcatcaataaacccggcccaggaattcctaatgctgtaggttaatcggcttattccttttttcttttccacaggcatacaatcagctctcgtcaaaactgcgacagtcactcgcaaataaatcacgcagcgtgaatttatctcgagtttattaattaaaaaccttaaccgttctctttcaggaaacgatgcattcactcactcgccgtccccctgctcctgaaacgccaccgcccgaaaatgccctggcgcggttattattctgggagcgtcaaaaggggacgcgatatcagccgcttaaagcgttttctcgtacaagcggtaacgcttgtacggcaccgcgccgatgcgttctaaaatcgtccgcatgccggtattggtttccaggatccacgacatttccagcgcgtcgatattgcgcttcgcgaaaggctcgcgcagcgcctcaatcagcagcagcgcaataatgggcccgatgcggctgaattgatattcctggcgtacgcccatcaacggcacgcgcgcggtgcgcacgccgctgactttcaggcgccacaatagcttcgcccagccgaacggcaataaacgcccctgcagatcggcaatcgcttcgttaatgttcggcagaccgacgataaaggcacagggggcgccatccacctcggcgatatggatcatatcgtcgggcaccaggaacttcagctgatcccccatggtggcgaactcgtgctcggtgaacgggacaaacccccagttatgttgccacccggagttgaacacctcgcgcagcacctgcatctcctcgcgaaagcgcttgcgattgagacggcggacggtcacctttttacgcacctgttccatcatccgggttaacgacggcgaaaaatgcaggtcggttcttttcatccaataggcaagcaaatcaatcccttcgctgtagccctgctgcgctatctgggccgcgtagtaaggtttcgcgtgcgtcatcagggcggaaggcggggtatcgaacccttcgaccaacaggccgctttcctgattgatattgaggctgaatggcccggtgattttacgcgcgcctttcgacctcagccactcctccgctaccgtgaataaggtgctgaacacggcgggatcgtcaacggcgtcaatcatgccgaaatggccggtatcctcaccatgcagctcccggtgcagagaatcgatttgcgcagtgatgcgtccaaccactttgccctgttttttggccacccatgcctgccattcaatatggtcggtcccgggattcttctttgacaggtgctcttcgcgctctacatgcagcggctcaatccagttcggatcatcgcgaaacagttgcgaggggaaagcaataaattctttaagttcgcgtttatccagaactttctcaatacggatcataaatagccttacgttttaataaaataattaaataagcacgcgacaacgcctttagcattttttatgctgttgccttttattgaattgtgtattgcctccggctcactgataagaaaaaccgaatattccccccggcgaatcagcaacgtgttgcctgacattcaccctgtgatgtccataattgataaaaaaaggaaacagaaagcggcgcagccaggctacgctaatagtgctcttttattatttcgtgctgttatggtaaaagaaactcgccgcttttagtgtaccgactttaatcaggaggtgcgccgccatttttaccacttaatgctatttttaagattagccttaaatgaatcgttcacttttgaatttcttgcggcatactgtttaggaagtgtttaagttccaagatagccatgcatgaggtcataacctatgagccgacagttatttcctgcccgacagatgcagactaaagaacggcgaagcccggatattacaatagtctctcatatctcgccagggtgccgctcaaggctgatgactcgggctacttacgctctgcccggttaataaccggcatgccgctcgagcacggcaatatacgctgttcgcggaatgaagatggttgaataacaaacttattcaaaacctattcatagtaaaacatcaattacctcgccaagagtgatttctctcttttggtgatttttaatctatggctaagtttgtctatgtctgaaacaagttccgttcattctcttcccatgcgctatgcggacttccccacgttagtggacgcgttggattacgcggcactcggtaatacgggaatgaatttttacgaccgtcgcaatcaactcgtgaccgttctcgactatcgcacgctgcagcaaaaagcgatcgcgggcgcgcggcgtttattgtccctgaagctcaagaaaggcgatcgcgtggcgcttatcgccgaaaccagcccgggcttcgtcgaagcctttttcgcttgccaatatgccggcctggtggcggtgccgttggcgatcccgatgggcgttggccagcgcgactcctacaccgccaaactgaaagggctgatcgccagctgcaaccccgcggcgatcatcagcagcgaagagtggacaccgctcatcgcgtcggccacggaaaacacgtcggcgatgcacatcctcagcgacgcggactttaacgccttgccagagccggaaatcgcgttgccggcgccttcgcccgacgatatcgcctatctccaatacacctcgggcagcacccgctttccgcgcggcgtgatcattacccagcgggcggccatggcgaacctgaacgcgatcagtcgcgacgggatcaagttgcgcgccggcgaccgctgcgtttcgtggctgcccttctatcacgatatgggcttggtcggtttcctgcttacgccggtggcgacccagctgtccgtcgactacctgcgcacgcaagatttcgccatgcgcccgatgcagtggctgaaactgatcgccaagaatcgcggcacggtgtccgtcgccccgccgttcggctacgatctgtgtctgcgccgcagcaacgccaaagagctggccgatctggatctttccagctggcgggttgcgggcgtgggcgccgagccgatcccggccgagctgctcgcccagtttggcgaacacttcagcagcatcaacttcgacagtaaagccttcatgccgtgctatggcctggccgagaacaccctggcggtgagtttttccgacccttgctccggcccgcaaaccaacgaggtcgaccgcgatattttggaatacgagggtaaagcggtcgcgccgggcaagaagacccgcgccgtctcgaccttcgtcaactgcggccgtgcgctgcccggccaccgcatcgagatccgcagcgaaaccgggcaaccgctgccggaacgtcaggtcggccatatcacgatttccggccccagcctgatgaacggctatttctgcgacgatgagtcccagcagcagatccaggtgaccggctggatggacaccggcgatctcggctatctgctggacggctatctgtacgtcaccggccgcaagaaggatttgatcattattcgcggccgcaatatctggccgcaggatattgagtacgtcgcggaatccgaaccggaaatccgttccggcgatgcgattgccttcgtgaccgaagaacacgacgaagcggccaggatcattttgcagatccagtgtcgagtcagttcggaagaacgccgtgaacaaatcgtgcattcgctgagcgcgcgcattcaaagcgagttcggcatcgcggtggacatcgagctgctgccgccgcacagcattccccgcacgtcgtcgggcaaacccgcgcgcgcggaggccaagaaacgctggctgagcgcttcgctctacccgcaaatgccgcagctggccggtttcgcgcaatgagcggcaccgtggcagtgacgggcgcgaccggctttatcggccggcacatcgtccaggaactgctggcgcaagggtttagcgtgcgcgccctgacgcggcaagccggaaaagccgccgcagacaacctgcagtggatccccggcgcgctggaagatcggccctcgctcaccgaactggtgcgcggcgcggagtgcgtcgtgcattgtgcgggccaggtgcgcgggcatgcggaagcggtgttcacccgctgcaacgtcaccggcagcctgaatttgatgcaggcggccaaacagaacggccgctgcaatcgcttcttgttcatgtcgtcgctggcggcccgccatccggcgctgtcctggtacgcccattcaaaacaggccgccgagcagcaactcatcgccgccacgggcgatatcgcgctggggattttccgcccgacggcggtttacgggcccggcgataaagagctgaaaccgctgttcaacggcctgctgcgcggcgtgctgccccggctgggcgcgcctgacgccaggctctcttttctgcacgtgagcgatttggcaaaggcggtcagccaatgggtgcagaccgaacccgcgcagccaaatatttacgaactgtgcgacggcgtggccgaaggctataactggctgcgcctgcgggacatcggcgccgccgtgcgtcacgggccggtgcgtctggtgggcattccgctgccgctgctgaaagccctggcggatatcagcgtggtgtggaaccgcctggtaaaaaaagagccgatgctgacgcgcagcaaaatacgcgaattaacgcatcgcgactggtccgccagtaatcaggcgctgtcgcaacagattaattggtttccacaggtgagtttggaacgcgcgctgcgtgaagggctgttttaattattccaagtagaggtgtgtcaacgttcttatgctaaatcgcgatgctgtaatggattatatcctgacgtgtttgcaaggtatcgtcgaaggcggagtggaaataaaacctgatagcgatctcgtcaatgatcttggcctggaatccatcagagtcttggatctgctgatgatgctggaagatgaattagatatctccattcctatcaatatattgcttgatgtcagaacgcctgagcaactgcttgacgcgctgcgcccttatctggagaaaaaccatgggactgtatgataagtttgcgcggctcgccaatgaccgtgaacaatttcaaacgtccggtctgaatccgttcggcacctgtatcgacgaagtgtattccgccacccaggggcgcatcggcgatcaaaagattgtcctcgccggcaccaataattaccttggcctgacgttcgatgcgcaggcgatcgccgccggccaggcggctctggccgcgctcggcaccggcaccaccggctcgcgcatggcgaacggcagttacggatcgcacctgacgctggaacgggagctggcggaattcttcgatcgcccgagcgccatcgtgttctccaccggctataccgccaacctgggcgtcatcagcacgctggcgggaccgggtgccgtggtgctgatcgacgcggacagccacgcgagcatttacgacgcctgcgccctcggcggcgcggaaattattcgcttccgccacaatgacgccgccgatctggagcgccgcatggtgcgcctgggcgaacgcgcccgcgaggcgatcattatcgtggaaggcatctacagcatgctgggcgacgtcgccccgctggtggaaatcgtcgacatcaagcggcgattgggcgggtatctgctggtcgacgaagcgcactccttcggcgtgatgggcgagcacggccgcggcctggccgaagcgctgggcgtcgagcaagacgtggatatcatcctgggcaccttcagcaaaagcctggcttcgatcggcggcttcgccgtcggcggcaaggggatggacgtgctgcgctacagcagccggccgtatatctttaccgcttcgccgtcgccgtccagcatcgcttcggtgcgcacggcgctgcaaaaaatcgcccgccatcccgagctgcgggaaaaactgtggagcaatgcgcaccgcctgtaccacggcctcgccgagctgggctataccctggggccgcgcatcagcccggtggtgccggtgatgatcggttcaaaggaagaagggttgcgtttctggcgcgagctgatcgcccacggcgtctatgtgaacctggtgctgccaccggccgcgccggcgggcgtgaccctgctgcgctgcagcgtcaatgccgcgcacagcgatgaagaaatcgacaccatcgtgcgcgcctttgcggcgctgaaaaaataaagcctttccttctcggccgcggcggcggtgccgaaaatggccacgccgccctgccgaaccgatgcgcacctcagtgcgcagccgttgataccccatcagccgaatagcgatacccctgcgccgccataaattccgcgatggctttttccgccgccgaaagcacctcctcgatcggccgatcggcatcgagatccacgatgtcggcgccttcgaacgtcaatagcggcgtgacggcgatcttcttctccagcgccgctttgcggtgatcgggtttgcgcgcgcaggccacgtccagactgacattcagcttgagcaccagatccggtttttgccccgccatccattgaaacgccgcccgttcacgcgccgccagccaacggacgaaacggctgccttcaacgtcgacgggaaaaaccgtgccgtcgtaagcgccagggatctgcgcctgcggaaaacggtcggtcaacacgatgaacccttgccggcgatacgccagcatgcggcgaaaacgcagcagccgccgccccacgaaagcgatgatcaccgccgacggcaacaggccgatccgggattttttcgttttgacttttttggtattgctctcgatagccttgcccaccgagcgcccgagcagcggcaatttcgccgccgcgcgcccgacattgcccgcctgtttgcccagatgcacctgcaccgccgggccataatgtttcacatactcgatcagatgttcacaaacggtggatttacccgatccgtcgctgccgataaccgcaatcagcggcggaaattttgcactcataataagactctctttcaatacaccagaaacggcgtgccatatttgaagcgaacgatcgcttatcattgccgcggtggctgcgtgaaaaaaaatttgccatacgcagcgccaaaaagcacaaaagattaagcgaaaattgaaaacctctgctcttttttcgccgtgagccatgccgagaattaacataaaaagcgaaaccagcccacgcacgaacaattagcacaaaataacaagaacaaacgccatgaatatcaattcaaataacgaaaaggaataccgatctcattattttatcgcagcaaagcacaataaatatcttgaacccaaggcgtattggaatacaatagtttttttcgcattggatcaattattgtgagtcagcagataagaccttcatctgatcgctcgcccgtgcgcgtaatagcgataaccggctgtgacggctcgggaaaatccacgttagccgccagcctggtcaacgctttatcggcacaagaacctgccgaactgctgtatctcggccagtcttccgggcgtattggcgaatggatcagttcgctgccgattattggcgcgcccttcgggcgttatttgctgaagaaatcggaacgcgtgcatgagcgcccttccacaccgccggataatgccacggcgctggtgatatttttactctcctattggcgcgtttataaattccgtcgcatgctgaagaaaagccgcagcggcgcattactgatcaccgatcgttatccgcaagccgaagtggcggggtttcgtttcgatggcccgcagctggcgaaaaccgccggcggcaatcgctggatccgctggctgagaaagcgcgaacaaaacctgtaccaatggatggcgtcttatcagcccttattattaattcggctggatattgacgaacaaacggcctattcacgcaaacccgatcactcgctgacggcgttgcgtgaaaagatcgccgtcatcccgcacctgacgtttaacggcgctaacatattggatttagacggccgcgaaccggctgaccgtattttcgacgcatcgctgcgcgccgttaaaatatcgctgagggccgccaatgcctagccgacaaataacctttccgtaccgaaacagatgaaaaaaaataaactcaccgccgaacaggatacctctcccacctgcatcaccgggctgattgccgtggtgggcagcgacggtacgggcaagtccacgctgaccgccgacctggtgaaaaacctgcagcaacatcgccccacggagcggcgctatttggggctgatctccggcgaagacggcgacaaaatcaagaagttgccgttcatcggcgtgtggctggaacggcgcctggcggccaagtccgacaaaacccagcgcatgagcaacaggccgccggcgctgtgggcggcgctgatcatgtacggcttttcgctgtggcgcgcatccaacctgcgcaaggtgcggcggctggcgcagagcggcgttctggtgatcagcgatcgctacccgcaggcggaaatctcaggtttttactacgatgggcccggcatcggcgtggaacgcgcaaaagggtggctattaagccgcctggcggcgcgcgaacgccgtttatatcaacgcatggccgtcaatcggccggagctgatcattcgccttgatatcgacgtcgatacggccttttcccgcaagcccgatcacagttacgaagagctgaaagacaagatcgccgccatggtgcgcctgcaatacaacggttcacgcatcatcgagctggacgccagagccccttacgacgaggtgctgagcaatgcgctcaacgccatttccgccgtggtgaaccccgcgaagcgcccgcagagcgatctcgggcaacccggcgagaacgccggtaaagaaactcaggtttattaaacgaatacagggcaaacgcatgactgcggaacacaaaatgcagcaaaacaacgataacggctggtttgggctatgaaacggtggttttccgacggcgcgtttcgttccattttacgtaatgccgcctacctgggctccggcagcgtcgccagcgcgctgctcggcctgctggcgctctcctgcgccggtaaaggcatgtcgcctgaaatgttcggcgtgctggtggtgattcaggcctataccaaagcggtcagcgatttcatcaaattccagacctggcagtttgtggtgcaatttggcactccggcactggagcatcaaaataccgggcgcttccgcgacgtcgtcgccttctccttcggcctggatatcgccagcggcgtcatcgccgtgctgggtggcatgatcatgctgccgttcttgtctcacgctctggggctggacagcgaaagtttctggctcgccatgctgtactgcaccctgatcccatcgatgacctcgtccacgccgaccggcgtgctgcgcgccttcaaccgcttcgatttaatcgccatccagcaggcgatcaaaccgttcctgcaggcggtgggcagcgtcatctcctattatttcgatctggggttccccggctttatcgtcacctggtacgcctctaacctgatcggcggcacgctgttttggtggttcaccgcgcgcgagctgcgccgccgcgatatccatggcgcgctgaggccgcgcctgttcaacgtcgcgcgccgcatcgagggcgcctggaacttcgtctggaccaccaacatcgcccataccatctgggccgcccgcaactcctgcaccaccgtgctggtgggcgtggtgctcggcccggccgccgccgggctgttcaagatcgccatgaccttcttcgatgcgacgggcaccccggccaagctgctggagaaaagcttctatcccgagatcatgcgcctggatccgcgcaccaagaccccgtggctgctcggcctgcgctcttcgctgctggccggcggcatcggcctggccgttgcggtgttgatgttgctggtgggcaagccgcttatttccgcggtattcgggcagcaatacctggaagcctatgacctgattcaaatcatgctgggcgcgatcatcgtctccatgatgggcttcccgcaggaatccttactgtttatggcgggcaaacagcgcgccttcctgatcgcgcaggcgacggcctcggcggcctacattgcgctgctggtgtcgatggcgtatgccttcggcgtgcagggcgccgccttcgcttatttacttgggcaatgtttagacgttctgttatccctgataccgacgatcggcgcctaccgcaatcgctttatgttggggctgaatgtgcccaaagagagtaatcaatgaccgctagcaataattggaaaaagttctcagccgaaaccacccaggcgctgtttgtcgcggtggaagaggacgacctggttgaggcgaatatcagcctgccgcagcagattgatctggaatgctcccccgagagcattcgggacaactacgcgctgtgcctgcagttttgggaagacggcttttcccgccgcgagctgctgcaattggtgaacggtttcctgcaagacccgcagttggcggcggctacccgcatgcgctacaaatatatccgcgcccgctataagcacctgcgcttcgcccagcagctgtacggcgccccgcaccgcgccaaccgcctgttccacaccaccaccgtggtgctcggccattttcaggacgcgtttcgcaacggcaaccagaagaacctgacgctttacggcaacctgctgcggctgctgctcagcaagccggtgtggtcttacgtgcgctatgcgctgcgccacacccggctggaaagcgcacagggctttatcacctaccgccaggagcaaatgcgccagctgcaaacgctgatcgccggcccgtcgctgaccgggcatcagttccatgacgtgcgcaaaatcgtcagccgccaggtctcgttctacgacacgctgagatcgatcgatcccgacaaccgcgaggcccggcagatctcgcgcttcctggcggcgattaacggcctgatgggcgaccggcatgacgtgatggtggcggacaagctggccggcggcgatatctatgatcggccggcgatcctggatatcgacatccgccagcgcctggagctgctgctggcgcgttttccgctgtcgttttcccagccggccatcgcggcgggcagataagcgggttgcacggagccatgatgacgttacgtcgcttgctgacccttgcgctgctgctgtcgccgctgacggcatctgcacataacttcgtgcatggccggccggtggcgccgatcgccatcgccgatcgcggcgagctgctgctgcgcaacggcgatttcagctaccggccgtggaacagcgcaaaactggcgggcaaggtgcgggtgatccagtacatcgccgggcgcacctccgccaaaaagaagaactcgctgctgatcaacgccgttaaggacgcgaacctgccgggcgatcgcttccagccgaccaccatcgtcaacaccgacgacgcgataccgggctccggcttcttcgtgcgcggcaagatcgagaaaaacaagcggcattacccttgggcgcaattcatcgtcgacagcgacgggctggggcgcatggcctggcggctgccggaggagagctccaccatcgtagtgctggacaaggccgggcgcgtgcagtgggcgaaggacggcgcactcaccccgcaagaagttgaccaggtgatcgccctgctgcgcgcgctgatcgcgcaggagacgccatgaagcgcacgccgccgggaaccgataacgcatgtctttgattgaacgctatatcacggttgagatccgccgcctggtgatgatgatcgccgggtttctgatcttcatgttcgccagctactccgcccagcgctacctgaccgacgccgccaacggcacgctggcgctgcgggtggtggccgacgtggttttctataagtcgctgatcgcgctggagatgatattgcccgtcgcgctgtatgtctcggtggcggtcgcgctgagccagatgtacagcgatgcggagatcaccgccatgctggccgccggcgccagcccgctgcggctgtacaaggcggtgctgatactcgccgtgccgctggcgatagcggtcacgctgctgtcgctgtatggcaggccctgggcgtatgccaatatttatcagctgcagcaacagtcgcaatcggtgctggacgtgagccacctgcaggccgacaaattcaacgtcagcggcaacggccgcatgatcctcgccagtcacgtcgacaaaacggccaaccacctgacggacgccctgatttatgtgcgcggcggccatcacaccaacctgtaccgcgcgcagtcggtggaggtgctcgacgccccccccgccagccccgccgtgcggctgaaaaccggcaccgcctatgtgctggatcgtgagggcgccgacgacaacgggcagaactacgacaacttcgacatcgcgctcaaaccgttcgtgcccagcgccgagagccggcacaagtcggcctcgccggcggaactggcgcgctccgccgatccgggcgacgccgccgaactgcaatggcgcgagagccgcgggctgaccaccgtactgatggtgctgctggcgatcccctttagccgcatcaagccgcggcaggggcgctacgccgcgctgctgcccctcacggttctgtttaccgtgattttctatggcggcaacatttgccgcacgctggtggccaacggctctctgccgacgatccccggcgtttggctggtgccgatagcgatggctgtcggtatcgccctgctgctggcgcgcgacctctccctgctgcggaaaccctcccgatgaccctttttagccgctatctgatccgcaacgtgttcatcggcttcgccgccgcggccgggctgctcatcccgctgttcaccacctttacgctgatcaacgagctggaggacgtgaccccaggcggctaccgctggcagcaggcgctgctggtgaccgtgatgaccctgccgcgcagcttggtcgatctggggccgtttatcgcgctgctcggcggcatcgtcgggctggggcagctctccaaaagcctggagctgacggcgatccgttccgccgggatgtcgatattccgcatcgcgctggtgatgctcgccgccgggctgctgatgaacctctcgctcggcgccctcgatgaatgggccgcctcgccgctgcagcaacgcgcgctgcaaatgaagaataacgccctggcgcagtcgaataataacgacgttaccgttaacccgctgtgggcgcggcgcggcaacgagtttgtgacagtgaagaccgtcgatgagaacgaccagccccacggcattgagatcttccgttatcaagccaaccgcgcgctggagtcttacatttacgccgacagcgccagcaccgccgccgacggcagctggctgctgcacaacgtgatgcagaaaagctggcaaggcagaaaggagacgattgcgcgacaagacagcctgctctggcgctcactgttcgccgtgccgagcctgaaagagctgaccctgccggcgggcagtttctcgctccaacagctggatcgctatatcgattacctgcaaggctcggggcaacccagcaccgaataccgcctggcgctgtggaaaaaactcggccagcccctgctggtgctggcgatgattttgctggccatcccgtttaccttcaccgccccgcgcgcccccggcatgggcagccggctagcgcttggcgtcatcatcgggctgctgacctacatcgcttaccagatcgttctcaacctggggttgctgttcgccctcaacgcgcccttcaccgccctcgccccgccgcttttgctcctggcgttggcgctggtgctggtttatcggtttgaccggcggggttaagcattttctgaggttgataagggataagaagagaatcgcaatttccattccagagaaaacatcacgcactcacctgctcgcgatttttaaggatgttagttaatggcaaagatagctgtttgtatactgacttttaactcctctcgtttattacacgaggtgctttctccactcatgggcattgcggatgagtggattgtggtggactccggcagtacggataaaacgctgtctatttgccaaagctttggaatcagccctatttatcatcgtttcgagactcacggacggcaaatgaactttgcgatttctcaagctcatcatgactgggtgttgtgcctggacagcgacgaaatccttgatgccgaaaccatagcatccattttaaaattcaaagcgcaggaaaacccaccgccacagcaagcctttagaattaaaaggaattggtttgttctcggacagccagtcagaacgatttatcccatctcctcaccggactaccccgttcggctgttcaatagaacgcaggtcaggttcaatgatgctccggtagatgatgccgctgaaggctatattcacacgtcggtcattcccggcaatgttaagcacgataccttttactctctccatgaaatattcaacaagctcaatagctatacgacaagggtagtaaaatacagaaacattaggccctcgatatttcgtggcatcgttagcgcgatcggcgcattttttaaatggtacatactgagcggggcatggaaggaaggcaaagtcggcgccgtcactgggttttatgccgtggcctacagtttcctgaagtattttaaatcctggtatggcaaagattgataatgttaaggacagaaacaggggcgtttccccgccgctactgatcctggcgttggtttatcgatttgagcggcgaagttaacaccctacagcagcctttagaaaacaagaactttccggttaatagttgaccggctttacaaattggcctgagccgttattatcccttatttggtgtcctaagcgccgttagctatcgctggctgccgttcgataacatgcccctcagggggccatcgagtgcaaggagtgcgagcgcccgcctgaacaggccaagacgcagcaagcaaaggaagagacacactatgttttccagtttgaaactgctgtatatcgccgatgatattatttcacctgatgattgaagatcagaaagacgaggatgtctccactatcagggggagaatatgagcaagttgataatggcaatggcgttactgtttactgttctcatgatgcaaggatgcaaaaaaaacatggaatatgaaccacaggatttttttgaaggccagcaactggacatcgcacagctgatttatgatggcgatgaagtgaaactgaaagagaaacttccctctgtcagcaaggaagaactgaatcgaccggttaaggcagacatgaccctgctgttttggtcggtgctaaactcaatctatgataaaaacacgccagaaaggctgaaaataataaccaacttggtaaaagctggcgcagacccgctgcaacccagaccagaaggaggaagcagcccagcggaattcgtcatgaaagccgacaaggggatttgggtcaaagccatgctcgacggcggtttaccgccaaacgcaaaagataaggtattcaatgagcccattgtattccaaacaatcaaagccaagaacacagaaacgttaaaggtgatgctggattacggagcggatataaatatcagagactccttacaacaaaccttattaatggatgctttttttagctcagcctttgagcacatgaccctactgctcaatcggggtgcgaatcctaacccggtaaatataaacaatctttcgctgttaacagcagtgaatcggcaaatcaaagacagccaagatggctcagaatacaatgaacagtgtaagaaaatactcgagctcatgcttttaaaaggagcaaaggaaacgcagtaatttcactaactcggatctgacagctgccggttatttatactgaagctgtcaggttacatctggctttcgataaacacgctatagaccaaaaaactgattgaagagacgaggatgccaccattctcagggggagagtatgagcaaattgataatggcaatagcgctactgtttactgtcctcatggtgcaaggatgcaacaaaagcatggaatatgagccacaggatttttttgaaggccggcagctggaagtcgcacagctaatttatgatggcgatgaagtgaaactgaaagaaaagcttccttcaataagtaagcaagaactgaatcgaccggttaaggcggacatgaccctgctgttttggtcggtgctaaactcaatttatgataaaaacacgccagaaaggctgaaaataataaccgacttggtaaaagttggcgcagacccgctgcaacccagaccagaaggaggaagcagcccagcggaattcgtcatgaaagccgacaaggggatttgggtcaaagccatgctcgacggcggtttaccgccaaacgcaaaagataaggtattcaatgagcccattgtattccaaacaatcaaagccaagaacactgaaacgttaaaggtgatgctggattatggtgcggatataaatacaatggattcattggggaataccttgttaataaactccctagactatcgctcgtttgatcatacgattcttttattggagagaggtgcagataataaaatcaagggtaagtttggttggactatgggcaatcagcttcagcgctttatagatagaggtgtaggcgacaccgaggataaagaaaaaatcaacaagataaaagaattgttaattaaaaacggtggagactggcctcctctacctatagagaattgagactcccttaaggtcagcgtcgaagacatgtaatatgccgctcaggggcgaaatggcaaccgcccctgctcgctctgtcgatagttgccggggttaacgcaattccttcgctatcgcgctaaacatcagcgacgcctccagcggttgcgcgctgaaagaaggctccgcctgaggccaggtggaccactggacgatcaccagattctccgcctgattgaccatgagcatctggccgaagatccccagcgcccacagggaatgcttgagggaggcctgcggagcgggttctacgttaatcgcattcaccggcacttcgttgttccaccactggtagccgtaaatgccgtcggggtgcgccgccgacacagaacccgccgcccgcgtccagttggccgactgggctacccaatcttccggcaagatctgtttgccgttcggcagcgtcccgttatgcagaatgaattcgccgaagcgcccccagtcttccagcgtggcgttaaagccgtgcgcacccacgtcgtgctggcctttggcgtaggcatgccacacgccgtcgctcgccatgccgtacggctgccagatgctttgttccagataggtcgccagcggcatgccggtggcgcgttccaacacgtcgcccagcaaccaagcgccgccggaggagtaagaccagttctgcccagccggatgcgcacgctgcaggccggctaccagcttgcgcacgcaggcgtaggtgccaggcctggcttcacactcggtcagctgcgcgaagtccgatttcgggttggtgtaatcctcattccacgccacgccggaggtgtgggtgatcagctgcctgagggtcacgccgtcccacgcggtgcctttcagatcgggttcgtattgcgtgatgagatcgtcgagcgagcggatcttgccctgtttaatcgctacgcccaccagcgtggcgaccacggatttgcccaccgagcgcgacgtccacagcgtggcgtcggtattaccctgccccagatatttccaggcgattttgccgtctttcaataccagcatgccgctgacgttctggcgctgcagataatcctgcaggtggtaggttttgccattcactcgatagctggcgtccgttagcggtttagcggcagccagcagcggcgcagcgttaccgtggtggaacacatccccggcatagttgcggtagtcattacgaaaaccgatcacccggtcgctctggctccaggtgagcatcttgtgcgtgtccggcaattgcgcatcgaaaggcgcgggacaggcgctgagttcggtgcccgcacaggcggccagcgcggcgggcgccaacaggccgctgcagagactgatgacaacgcccgccagcaggctgcggttaaacactttgcttttcatattttttctcgcttagctcaggaaggtgttcagcttaaaaaaacgcggcctataataaaaaacgcctgatgggggaaaatcccccgaaaaatcgacgggagaaccgcgtgccgagcctgatttattcctttgcccaactggaagccttcaccgccgtggccgagcacggcagcctggcgaaagccgcgctcaagctgggcaaagaccgcacgacgctgcgcgatttgattgattttctcgaggatggcttgggctatgcgctgttcctgcgcgaggggcgcagcctgcacctgacgccggaaggcgaacagctgcagcaccaggcgcacctgctgatgcgccaggtgaaagcctttgaggcgttcgccaaagacgtgccgaagagcgcagcgcaggaaatctcgctggtctacgatcccttcacgccccgcgcattgctgcaagcgctgattgccgccatggcccagcgcaatacgcgcctgagcctgattaacgcctcgcgcgacgaagcggaaagcctgctggcaagcagccaggccgatctgggcatctgccaggcgcgcaaccgcagcgtaggcgacaccatggagtggcgcgccttaggggcgatagagatggatttttacgcctccgaagcgcttttccccggcgcggaacagccgctttcgctgctggagctctcgctcacgccgcaggtgatcatgcacccggattctgacgaaccggtggcgcgccgcctgcaaatttcagggcacaccatcttcaccaacgaattggagatgctgcgcgccctgctcgaacagggctgcggctggggattcctgccgacacacatgcatgccgaacagtggaaaaacgttaacacgctgcgtaccgaagtgggcagccaggggatcagccaaaccatggtcaccatctggaagccgggcaatgaccgacgggcgctgattgatgagacgttggggttgttgccgggattgtggcggggagctgaggggtgaaaagtcgctgttagattagcggtgtttttactggtaatcgagagtagagctcatcagctgcgttgtttatccgaacgttcttaagcggggattgttgttttccccagcgagtccctcaccgccgtcgctccagcgctgctggcgctggtttattgctttgaatggtggcatttgagggggggctttgagcgaggagcagacgtctacatggaataacctacttaagggctcttcatgcaggtccgctcgagtaataagttaaagattagaggcaagggctgcattgatacattttagtacatcatcatcttttccaatagatacggggaaacctctaacattaagaatgttactctcgattgagataacaagtttttcaccttctatagccaaaccaaatattttagaacgctcacccaaaattgaacgagccaagatattgaagtttgttgatgattcaccactctttaatctggcatgagctggtgcaacaattgaaagcaaaagatctctcagtgcatcagcttcacatattacttcagtgctcgaggcatgctggacgcagcggatcaaatctgaatatgcggtgttaacatcgtcaagcgataactgattgatatggtcaatttcaccaacagccgcacttggctttccaattgaagtaaatggatctgaattttgatagtaagactctactgaacctttgcgtaaaataaataggccacactgttccagcaggtcaagtagcacttttaaacggatctttatactactccactcattgtccttagctaaattttccaattcattatcatcaataatgaaaagtgtacagaaagcagagcggcgctttgcttgtgccacttcctcggttttcttgttcacccaatacgggtgcaattcggcgattgcagaaatttcattccaccggcaatctaccaatttgcaaaaatctgtgaatatagcactaaccatttgttgcgaggatcgataccctaactcactggctcgcgtttctgcggtgggattatcattaaggtatgaattgacaagatcaagaccatcagcgattccatcagcgtccgccaacgcaactgggcttttgccgagtaaacgcaataattttgccacggttggcatctgtcctttaccaatcacaggtaataactgtgatccggcagcttcaagatgtatatcaagtttgtttgcaagcgcactgcaaatcattacatcagaggggccttcaactaataaaggccgtttggaaaacaatgataacttatgctcttgtccgagacgagcaattaagttttgtacttttttgttcctgagctcgccagcgtcagctggaatttgcactggctcactaatcaggtcataacagaagacaagagatagtaaatcttccggtttctgaatttggagcatttctgttgaatgagtagcgatgataacaatctttttattacctccctcagacgggtggcccgagacactgaggatttcatgaagaagaaatgcctgtaactgaggatgcaaggaaacctctggttcatctagaagaagcgcccctacatcatcatcataaagtgcagataaaatcccaaccagatgcatcaatccggatgcctctctgcctgacgagtatgattttgcttctatgtccaatcgcgaaaataatatttttagtgatccaccatcccattcaataagaatgtcgcgcttgaataacttccgaagtctctcctgaattttaattaaaatatcagcccgttcagcaagcgtttggaaatcgccattaatagtttccatctgatgtctgcgaacagtatcactcttgctaccataagttgcgtagtcgtactgtggtgagcctccacgatgcccgtcaaagtctgatctatactgctccaacatccccattcgtccagcagagagaaagcgcacatactttccattcgtatgctgactaagactttgcttgagccccctcaaaagatgtgtttttccagagccatttgggccgagtagaactgtaagacctctgtttaaggtgaccttgcgattgaaattttcattgtgaccagcaatttgcgctgtcaattctagagggaaactcacttgcatcactccttatgcatgacatgttcagcaaaagggtttccatgctttaattatggggtatcccttatgccctaaactttaataataaacggaagtaactaaaatttaaaagctgacaaaaagaatactgttcgtcagaactaaaatatacatctataactcgaataattcagcatgataattgctcaaattcacattaaattttggtggggtcgctttgcaaaggaagtccgcatttggcacaaagcagccattaatacctaacttataaccataaaacacaccttaccaaactctccttcaacataatatagccacataaaatgattcaactcataactaataaaccaacgacattattacctctattttcattccattattctccctcccctcgctctccccccaactcccccctagcaccgcccccgccctttccctacaataagggatctgttgaggcataacgcaaggaaagacggtgtcgaaagccaatcccaatgccactatcgtggatatcgcccgccgcgccagggtgaccaatatcaccgtttcccgcgcgttcaataagcccgagctggtcaagccggaaacccgcgagcgcattcacgccatcgccaaagagctgaactatgtgcccaacgcgttcgcacaggggctgaaaagcagcagcagccagattatcggcatcgtcaccagcagcatgtacaacccgttctattccggcctgatcaagaccgtgtcgcgcattgcgcgccagcagggctaccagatcatgctgttcgacaccgacggcagcgaagaggcggaaatgcgcgccattcaggcgctgttcggctacaaggcgcgcggcatcctgctctcggcagtgcgcgacgacaagcgctaccgccccgcctatctcgagctggccgaggtgtacggcgtgccgctgatcctgatcgaccgcgatctttacgatcagcagctgagcggcgtgttcctcgataaccgcgagatcggcgtgctggccgggcgttatctggcggagcagccggagcagaagcttttgattatcggcggcccggcggattcggaaattacgctaacgcgcaccgccggcatcgtcgcggccttgcagggcagcggccgtgagattcacatcatcaacggcgactacgatttcacctcacaggaaagcgaggtgcgtgcctatctggcgcagccggagaaccgcccggattacatcatcggcctgaatggcatcatcacgctgggcgccatcgccatctgccacgagatggggctctatcagcaggtgaaattcttctcgatagacgagccgccgcgcgccggcgcttacggcctgcacattccgggggtgtatcacgatacgcaaaaattgggggagatcgccgcggagctgctgttcagcgccattaacagcccgcgcggcgagctgccggtgcgcagagagttcttcaccggctcgctgttgaatcgctgacgggcgctattgcccgtagtaggcgtgtttgccgtgcttgcgcaggaaatgtttgtccaatagctccggctgcatcggggcgatggccggcgccagctggcgcgtcgccatcgccatgatcgccacctcttccagcaccaccgcgttgtgcaccgcatccgccgcgtccttgccccaggcgaacgggccgtgggagtaaaccagcactcccggcacctgctgcggatcgcgccccgcctgattgaaggtctcgataatcaccttgccggtttctccctcgtaatccccggcgatctccgcctcgctcatcggccgggtgcagggaatgtcgccgtaaaagtagtcggcgtgggtggtgcccagcgccgggatcggctgcccggcctgcgcccaaatggtggcgttgcggctgtgggtgtgcaccacgccgccgatatcggcgaaggcgcggtacagcgccaggtgggtggcggtgtcggatgagggtttgcggcgcccttcgcgcacctggccctccagatccaccaccaccagatcctccagcgtcatcgcctcgtaggcgatgcccgaaggcttgatcaccaccagcccgctctggcggtcgatcgccgagacgttgccccaggtaaaggtcaccagcccgtatgccggcaggctgaggttggcggccagcacctgccgcttgagttcgttcagcatgcgatgcctccatcattcatctgttgttcgagccaggccttggcctgggcgatacgttgcttgtcctgcccgtcttcgcgcgcccacatctccagcaggtaggggccgcgatagccgagcgcgttgagcacggaaaaggcatgggcgaaatccacgcagccttcgccgaacggcacgtcgcggaactgcccggcgctgcccggccccaccgccacggtgtctttgaggtgcacggcggtgatgctgccgatgcccagcgtcagctcggcggcgacgtcgttgccccaggcgctaaggttgccgagatcgggatacaccgtgaaccacgggctgttgacgtggcgggcgatgtcgcgccatttgctgatgctgttgatgaacggcgtatccatcacctccaccgacagcatcacctgcgccctggcagcctgcgccgccgcccactgcatgccctcgataaagcgctcgcggctgtggcgatcggccggttcgtaatagacgtcgtaacccgccagctggatgttgcggatgccgagatccgtcgccagttccagcgccttgctcatcaacacccgcgcccgctcgcgggtggcggcgtcggcgctgccgaacggatcgcgccggtgcgccgacaggcacaggctcggcaccgtcaccccgctgtcgagccgcgcctggataaacgccagccgctggcggcgatcccagtccagccgctgctggcgtgccggctgttcgtcgatcgacatctccacgaactcaaagcccagctcggcggcggtggccagccgctgcggccagcccagatcggcgggcagcgccttttcatacagccccagacaggcggcgttagtcgtttgcatcagtcacctcactcaaagcctgagcgaccgccagatagcgcgcctgctgggcgcgcaggcgccgatgggcggcggtcgcgggataataacagcgcagtttgggcggcgcggcggcgatcgcttcggcgaacccggcgtactccccggcgccgacggcggcgcacagggcggcggcgcggcagccgctctggcgcgtttccaccacctcaagcggcaggttgccggcgtcggcgtacatctgcatccacacctcagactgcgtcggcccgccggtcatgcgcacccgctcgatgcgcgggttcagctgcaccatgcgctcctgatggatcaggtgcgagaacacgatgccctggtagatcgcctgcaccacgtccgccatctcgtggtgggcgctcaggccgatcagcccgcccggcgtgttgccgccgaggttggagccgtacagatacggcaggaacagcagcccgctgggctgctcgcggcgctcggccacccaggcgttgaactgggcgtagcgctgccggtcgtcggcgcagaactggcgcaggaaccaggccaggttgccggccgaggtcgggctgccttcgtgcacgaaatagcggccgtcgatacaatagcgcccccaggcgtaggggtaatcggcgggaatgatgcgctcggtcacgcaggtggcgatcgaccaggtgcccgccaccgcgctgagcgtgcgatcgtcggccacgccggagctgagcgccgcgcccaccacgtcgaacaggccgccgtacaccgcagttcctacccgtagaccacattgcgccgccgccgcggccgtcacccgcccggccagctgcgccgaaccgatcgttggcgcggttttctcctgcgcctcttcgatgccgaaggccgccatcagcgccggatcgtaagcgccgctgcgctggttaaacaggttgctgccggagatgttggtcacttcggccgccgcctcgccggtgaggcgaaagcgcaggtagtcgtgcgccatcaggatgcgatcgacggcggcgtactgcgccggttgccgctgcttcagccagcgcagcagcagcgccgggtggctgggccacagcggctgcaggctgcgcgggtaggtctgcgcgtccacgccggcgcggcgcagctcagccgccgtttccgccgcgcggttgtccgaagagaggatgccgttgccgaccggtttgccgtggcggtcgatggcgtacagccctttgccgtgcgccgaaaagctgacgccgcgcacctgcccggccgacagccccgccgcgtgcagcgtctggcggatcgccgcgcacacgtcatcccacagcgcgtccatattgcgttcgctaaagcccggctgggcagcaatcgccgcgccgtcgcgctcggcgatcgccagctcttcgccgcttgcccggtacagcccggccttgatcaccgtgccgccgacgtctatgccaagaaagactgacatcgcgcctcctatttgcgccgcacggagctgaggtagatggcggccagaatgatgccgcccttcaccacgttctggatatacggcgacacgttcatcagattgaggccgttgttgagcaccccgagcatcatcgcccccaccagcgtgccgacgatggcgccgcgcccgccggagatcgccgccccgcccagcactacggcggcgatggcgtccagctcgaagccttcgccggcgttgggctgcccgctcatcaggcgcgaggtcagcaccagcccggccagcgcggcggtcaggccgctgatcacgtacaccagcatcttgtagcgcggcacgcggatgccgctcaggcgcgccgcctcttcgttgccgcccattgcatagacgtagcggccgaacggcagctggttgagcatcagccaggccagcaggtacacgccgagcatgatcaggatcggtacctgaatgcccagcaccgtgccgcggccgaagaacgagaagacgtcgggcaggccggagatcgggtagccgccggtatagagcagcgccaggccgcgggcgatgcccatcgacgccagggtgacgatgatcggcggcatgcgcaggtaggcgatgcaggcgccgttggccaggccgaacagcgcgccgagcgccagcgcggccaccatcgccagcgggatcggcaccgccgccagcatcagcccggcggcgaccgagccggccagcgccatcaccggccccaccgagagatcgatgccgccggtcaggatggcgcaggtcatgcccaccgcgatgatggcattgatcgacacctggcgtgccacgttggtcaggttgttgacgctgaggaagctgtcgttcagcaggctcatcagcacgaacaggacagcgaagccgataaacggcaggaccgccgggtgatgcagcagtttttcccagcgcttgccgaggctggggccggcggcgcggcgcgccacggcgggttgttcaattcctatcataaggcactcccggtcgcgtgaagcatgatgtggttggattcgatgtcgtcgccggtcagctcggcgacgatgtggccgccgcgaaacaccagcacgcggtcgcacacgccgatgatctccggcagttcggaggaaatcatgatgatggagatgccctgctgggtcagttgctgcatcagctggtagatctcggccttggcgcccacgtcgatgccgcgcgtcggctcgtcgaagatcaggatgttgcagtcgttgttgagccagcgggcgatcaccactttctgctggttgccgccgctcagggtgctgacggcggtctcggcgtccggggttttcacccccacggcgcggatcagccgctgcaccacgtcgcgatccttgcgggcgctgacgaagatcttgccgcgccggtggtgccggttgagggtgatgttctgcgccaccgagaacggcagcaccaggccctcggttttgcggctctccggcagcaggccgatgccctgcgccagcgcctgcgccggggagcgcagcgccgccggttggccgccgaggctgacgcgtttgcggtggcagcggctggcgccgatcagcgccgagacggtctcggtgcgcccggagcccaccagcccggcgaagccgaggatctcgcccttgtgcagccgaaaacggtcggtcgcgccgtgcttctcgcgctggatctccgcctccagcagcaccgtctcggtatcaaccggatgctgtttcaccgggaaggcgttctcgattttgcgcccgaccatcagccgcaccagctcttccacgttagtgtcgccggtggccagcgtttcgatgtaggcgccgtcgcgcagcacggtgatgcgatcgcagatggtgaagatctcgtccaaatggtgcgagataaacaccatgccaacgcccagcagccgcagatcgttcatcacgctgaacaggtgttcggcctcgcccggcgtcagcgtggcggtcggttcgtccagcaccagcacccgcgcctccagcgacagcgccttggcgatctccacaaactgctgctgcgccacgctcagctgctccaccgggcaatcgagatcgatagccaccgtcagccgcttgaagatcgcctcggccttgcgccgcatcgcccgccgatccagcaggccccagcggttcctgatctcccggttgaggaagatgttgtcgatggcgctcatgtagggaatcaacgagaattcctgaaaaataatgccgaccccggcctcgatcgcctggcgatagttgttaaagcggcgctgctcgccgtcgataaaaatgtcgccctcgtccggctgatggatgccgcacatgattttcaccagcgtcgatttgccggcgccgttttcgcccagcagggcgtgcacctctccccgttgaatggccagatcgatgccgtccagcgccttcacgccgggaaagctcttttttattcgcttcagttccagtaaaggtgtcaccgcattgccctccgcgccgaacgccccgccgcagcggggcgaacctgccgctgttaccagctaaagccggccgcattgctgcggtcgatcagcttcactttgaccggcacggttttcggcaccgtggcgccccagtagcgggccagcgcaatgccgagcgcgatgcgcagctggtcgcgcgggaactgcgccgaggtagcgatgaacggcgaattcggcttgaggatctctttgatggcttccggctggccgtcgacgctcaccagcttgaccttggcgccgttgctttcgatcgccgccagggcaccgagcgcgccgacgtcgttgacgctgaagatgcccgccaaatccggtgccgactgcagcatgttttcggtgacggtcagcgcggtgtcgcgctcctgcttgccgttttgtttggtgacgatcttgatgtcggggtattttttcatcgccgcttcaaagccgcgcacgcgctccaggatcggcaccaccgggatgccgtcgaggatcgccaccttgcctttgccgcccagcgctttcgccaggtattcgcccgcctggaagccggcgtcgtagttttccgagccgacgaacgagtccagcggcccttcggcctgcgcgtcgatcgccaccaccaccgcgccggccttatgggcggagatcaccgccgactgcacccccaccgagtcggtcgggttgatcagcaggatatccaccttcttctgcagcatgtcttccacgtcgccgatctgcttggcgacgtcatggcgggcatcggccacatacaccttggcgccgatatccgccgccgcctgatccagcgcctgcttcatggtgacgaagtagtcgttgttcatttcctggaacgacataccgatagtgatttgcttggccagcgccccatggctggccgccaacattccaccggcgacgataaaaggcagggtctttttgaataatgaaaacatagccaattctcctgtagggaagcttcttgttgtggttatcagagcaacagcatgtctttacgtttggccgaccggccggcccccccattgcggagcgggccggcgatcgtgactgcaacagcggtacagcgggagggtcagggaaccaggatcaccttgatggagtcggtcgagtccgccagggcgaaggcttcgtcccagtcgttcaatgaatagctgtgggtcaccacgccgcttgaggtcaccagcccgcgctcgaacagatcgatggcgatctcatagctgtagggcgccaggtgcgcgccgcgaatgtccagctccttgcgatcgccgatgatcgaccagtcgacggtggtttccttgccgaacacgctgaactccacgaagcggcccagcttgcggatcatctgcagcccctgagtgacgccgatcggcgcgccggtggcctcgatgtagacgtcgcagccgtagccgccggtcagcgatttgacgatctggtcggcgtcttccttcagcgggttgatcaccacgtcggcgccaaactccttcgccagcgccagccgctcgtcgatggcgtcgatcacgatcagtttcttcggcgttttcaggcgcgccacctgcaccatgcacagccccagcggcccggcgccggccagcaccaccacgtcgtccagctgaatgtcgccgcgcgccacggtgtgaatggcgcaggccatcggctcgatcaataccgcgtcttcatggctcaggctttccgggatcttgtgcacgatggcgttctcggaaaagcgcatgtattccgccatgccgccctccgccacgtctttctggaagccgtaaatgttatgcgtctcacacatccagtaactgccggatttgcagtaacggcactcccagcacggcacgatctgctcggcaatcacccgctcgccgatccggtatttgccttccgcgccctcgcccagcgcggcgatgcggccgtagaactcgtgccccggcaccaccggcggtttgacccacgggttctctccccaaaacatctgcgcgccgttcttgcacttgcagtcgccggcgcagatgccgcatccttccaccttgatcaccagctcgcgcgccttcggcagcggcgtgggcacctgttcgaaacggtagtcctgcgggccgtggcaaacgaccgcgcgcattttttccggcagctgactcatccactcctccaatacactcgttaaacacttgaaaaacctaaatgttgacgttgtcatttttatctaataaaaaacaaccaacgttataaagtgataaatttcaattgattaatcatcaaacacccaggaaaactcaaaatgacaacgtgaacatagagcgacatataaccaaagctgcaaaaataattatttgagcaaaatcacagttcgttaacattgcagctaaaaatgctacaaatgcggatcgcgatcccatttacgggatcgccgatccgggcagatccgctaaatcagcaggcgcacgcgatcgtagatctggcgatcctccggccgcgacgatcgcgcctgctggcgcagggtacgcaccagcgtgtcgataaacgcatgggcggcggcgctcagaatgctgttgcgccgggtgacgatattcaactgcgctggttggcagctctcgcgcagcgccagcggctgcaagcgagaggcgaattgcggcagcgcggcgatcggccgcgggcaccaggtgcacatctcggcggattccaccagcgcctgcagcatgccgaacgaatgcgcctggataatgcgctggcgcggcaggcgcacgccgtggcggtggaacacctcgtcgagcagcgcatcgaaactttcctgggtatagctcatcacccaatcctgctccagcagctgatgcagcgaggtgctgtgcgccagcgggtggccgcgccgcaccatgtacgccgtttcatactccagcagcggctcgcagtgaaactcctgcggcgccgacgacgccggcagcggcgtgatggcgaaatccatcgtgccctcacgcagctgcgactgggcgttggccatcaggctttccgacagttccagccgcaccgccggcaccttgctgcgaaacgccatcaccgccggcggcagcaccgtcagcatcagccagggggtaatcgccgccttgaccagatccgccgcactcccgcgcagcgccgccatttcgccctgcgcctgctccaactggttcagcaccagccgggcgtgcgccagcagggttttgccgtagggggtaaaacccagcccggtcggcgtgcggatcagcagcggcagcgcctgttcttgctccagttcgcgcagtgcgcgggtcaccgccgcctgcgacagccccagatgccgcgccgccgcgcgaatgctgccgctgtcggcgctggccaccagcgcctgcagttggtgcagtttcatgtccacctcctgacaatcataggttgtcagcataaccgaacggcggctacccggcaaaaacggagtttgctagtctcgatgcctgtccctctgcctcgttccgtgcccgttggccggaatccttttgccggagaccgtgatgaacccttcactggtactgcctgagatcgccgccgttcatgatgagatggtcgcgcttcgccgccacattcacgcccacccggagctgggcttccaggagtttgcgacgtcggatctggtggcgcagcggctggaggaatggggttaccgcgtcacgcgcggcgtaggacaaaccggcgttgtcgccacactgcagcgcgggccgggaaaatcgctcggcatccgcgccgacatggacgccctgccgattgccgaaacgaccggcttgccgcacgccagtacccattccggggtgatgcacgcctgcggccacgacgggcacaccgccatgctgctggcggcggcgcgctatctggcgcggcagccgaacttttgcggcacgctgcacctgatctttcagccggcggaagaaggcggcggcggcgccagagtgatgattgaagacggcctgtttgagcgcttcccctgcgacgcggtgttcgccatgcacaacgtgcccggcttacccaccggccacctgggcttcgcctgcggccccttcatgtgctcggccgatacggtgcacatcaccctgcacggccacggcggccacggcgcggtgccgcagagcaccgtcgatccggtggtggcctgcgcagccatcgttatgagcctgcaaaccatcgtggcgcgcaatatcgatccgcaggaaacggcgatcgtcaccgtgggggcgatgcaggccggccaggccgccaacgtgatcccggcgaccgccaccctgacgctcagcgtgcgcgcgctgacggcggcggtgcgtgcgcggctggaacagcgcatcaccgaactggtcacggcgcaggccgccagcttcggcgcccgcgcggagatcgactatcagcacggctacccggtgctggtgaaccacccggcagaaaccgaactggcgcgcgcggtggcgctggaatgggccggagagagccgagtgctccccacgctgcggccgttcaccgccagcgaagatttcgcctttatgctggagaagtgcccgggcagctacatctcgatcggcaacggccccgccacgccgggcaattccctgcacaaccccggttatgacttcaacgacgacagtctgtcgttgggcgccacttactgggtcaaattggtcgagcgctttttggctcgccccgcggtttaatcgccaacacagaggaaatgacatgaaaatcatcaaagggctgttgttgttgctgccgctggccgcgagctttcccgcgctgagcggtgaattcagcggcaaagtgatcaagctgggcatcgatcccacctttccgccgctggagtataaaaatccgcagggcaagctgaccggcttcggcgtcgatatcgcccaggcgctgtgtgaccagatgcaggccaaatgcgtgtgggtggaaagcagctgggacggcatgatccccggcctgcaggcgaagaagttcgacgccatcgcctcgtcgatgaccatcacgccgcagcgccggcagcagatcgctttctccagcaaagtctccaacgccccggcgcggctggtggcgcataaaggcagcaatctgcagcctaccgccgcctcgctgaagggcaaatcggtcggcgtgcagcaaggttccagccaggaggcctacgccaacgcgctgtggcggccggccggcgtcaacgtggtcgcctaccaaagccagcaggaggtgaacgaagatctggccaacggccgcctggatgcgtcgctgctggccagcgtcagcgccagcgaattcttcaaaacgcccggcggcaaagactttgcctttatcggcgccgaattgagcgacagcaagtacttcggcgtcggcgacggcatcggggtgcgcaaagaggataccgcgctgcttaacgccttcaacgccgcgctgcaggcgatccgcgccaacggcacttacaagaaaatcaacgacaagtatttcgatttcgacatgtacggcgcggagcagtaacacgcgttccccggcggtcacctgcaggtcctgcaggatggggaggcgccttcggccgccggggaacgccccaacggaaacggcagtgtcggcaagaacggaaaatcaggcgggataaggatgcgggccaggcaagacgcctggcccgataaggcgggttacttcacttcgcccatcgctttcagctttttggacagctcgcggcgttctttggacagatcggcatttttgatgatgtagtcatcaacgcgatcttcgtagtcgctgcgcatgttggcgatgatgccctgaatgtcttcgatgctcatgccgggcttgatgtactcactcaggttgtcgagcagcagcacgcgcttctggttatcacgaattttcttttcgttgtcgacgatctcgcgttgcagtttgtttttgcggcggaacatacgcacaaactccagcacgtcctggaaactcggcttatttgcattatccatctttatacccttgctttagtaatacacagattcattttcttacggccacatggcaccaagatacaggtttgtggcggtccggcacaacagtgattggcttatcttacccactttgccccggcggccaaaacccaaagcgccgccttcatgatctgaccccttattcgcgcccggcggcggtgcaaacctgaagcaaatcccccaactcttccaactgctgcgccagctccatgctgagccagacatagccgtaaatcggcgcttcgccgtgctggccaaggctgacctcttgcatcagcgttttcagctcgccggcgatctccgccaactgccccgccgccgcctgccgctgcgcctgcggcccttcgcgcatcagcaccgccaacgactccagcgagctcagcgtcagcagctgggtgctgcgcagcgtgcgggcgttcagcatgatgaagtgcgtttcacgcgaggcccagtaggcgtcggccatcagctccagcgtgcacaccagattgcggctgagggtttgcaccgcctcgaacaccgctttggggatgcgggtttccttgctggcgggcacgatcaggctgcgcagcttcaccacctgattcaacagatccttgagctgcggctccagccgcggccgctcaatgacgttcggcgaaaaatacgcgccgtagatacgggcggcggtttgcagacagtccgccatttgcatgcgccacagaatataggcgcgctgtgggtagatgctggtgaacagcagcgccagcagcgagccgaagatcacgtcgccgctgcgccacagcgcggtgtgcatgtcgccggcgcccgcgccgcacaccaccgccagcgtgatccccaccagcagcgccatatacggccgtttgccgagcgtcaggtaaccgcagacgaacatcaccacgccgcaccatgccagcatcagcggcagcgaatagagttccagatacagggcgatcaggccggaagccgcgccgaacaccgtaccggcaatgcgttgcagcgcccgctgcagcacgttgccccaaaacgagatcggccccatcaccaccaccagggtgatcagcggccaggtgccttcgggcaccgccagcaggcggatcagcagaaaggtcaggataaacgccagcccgatgcgcacgccgtgaacgatgcgatagtggcgataggtcagcagttcaaatgaagagatttttcgatcgaggcgcacagtgcctccgataaacaccagccaggccgctattttagcggaggaagcccggcaaggaaaaggcgaatgaggcgtccctcattcgcactcaggctcaggcgacgtatttgtcgaccagcgcgcgcagaacggcggcggtttcaacatccatcacgccgtcatacttctgcggacggaagtgcagctggaacgcgcgcaccagctggcgatagccttctgcggtgttcgccgccgaggtgtcgtagccgtattgggcgaacagcttcagcagctcagcctgcgccggcaggccctggctgcagtactcctgctggcgctgctgcttggtcgcttcgtcataccaggcgccgacgccggcctgatacagctgctgccacgggaactgcgggcccggatcgctcttgcggcccggcgcgatgtcggagtgcgccaccacgttcaccggcgagatgtccggataacgctgcaggatgttctgcgccagctgggtgaccgcctcgatctgctgcggattgaacggcgggaaggtgatgtttccaccgtcgccgctcgccaggttgacgatctcgatgccgatcgaggtgtcgttgatattgctgcgggtgccccactggctggtgccggcatgccaggcgcgctcgttctcgtccaccaggttgaaaatgcgcacgccgctgaagccggcggcctgataggtggcatcggtcggatccggcaccagatagtgcgcgctgaccgattttccggtcaacgacgtcaccgagtcggcgaagttttgcgccgtgtagtgcagcaccagaaagcgcacgcggtggccgaagctggcgaccgatcggtagctattgtaatcaatcttgtacatcgtaaagtccctctctcgtttgatttcactgagcggcctctcatcatgacaggccgctccgcacaggtgaacccttggctcaccctttttgttttagctaattgctaaataatgcgcaagcgttttttagcaaaaccgttatttacctttttgctaaagagtgcgatcattgcacgatggaaactaaagaaatcaggcgcaacaatctgcgcgaattaatggcccgctacgcccggcaaggcgtcaaccagaatgagttcgccacgctggttgagtcttccgcgccgacgctgagccaaatcatcggggaaaaatcctcccgcaatcttggcgacaatctggccaggcggatcgaggccaggctgaatttgcccaagggctggttcgacgtgtttcatgaaaagcagctggtgcgcccgtttgacaacgtggcggcggagtcggacttccagcccgcccgcttgaaaccggtggtatgggaagataccgaacaagacaaggaagagtttgtggagatcccgctgctggatatcgatttttccgccggcgacggctgctacgaaatcgtcgatcgcgaggagttttcgctgatcttccgccgttactatctgcacaagatgggggtggcggtcaacgccgcgcgcattatccgcatctccggctccagcatggaaccgcgtctgcaggacggcgacgtggtcggcatcaataccgacgacacgcgcatccgcgagggcaagacctacgccatccgccacggcaatttgctgcgggtgaaggtgctgatcgaacagccggacggcggcgtcgtcatccgctccctcaaccgggaagagtaccaggacgagcatctcagctatcagcagcgcaaggagcaactggtggtgctcggccgcgtcttctggtcgtcttcgtcctggtaacggacgataacctcgggcgcccgttgcgcccggcggttatttgaagtccaccaccatctgctgctggatagacagcccgcgcgtcgactgcacgcagccggcgatgtagtcggtgaaacgcggcggtttcggcatgcccagcttgaggatcttctcgttgctgaaacgcacgttgagcatggcgaacgatccgtacaggcgcatcgccttcagcatcagccgctcgttgcacgggccgaaaatgtctttcagctggcggcgcattttcaccagcgcgtcataggtcacctgcgcatactcatcgcccaccggcgctttttccagggccgccgccatggcgttgtcaatttcggcaaagctgacgctgctctcctcaccggcagagatgtgataaacgtcgttctccagcgtttcgctgttcatcaacatcaccagcgcatccgcgcagtagtccgccgggatcacgtcgatattgtcctgcagcgagcacatgaacttgcgcagcatcagcgccatgccaaacacccagaaaatgctgctggaaggctggcagcccaggcgggtgtgccccaccacgatcgacggacgagcgatggtcaacggcatttgcgggcagcgctggcgcatcagctgttcgatggtggatttggaacgggtatattccaccaggtgttcggcgtcttcctcaaactcgccgctctccgccaccagcgaacccggctccggcgaacaggacatggcggtgccgacgtgcaggaaacgttttaatcccggcacctgcgccattctttcggcaaaggccagagtgccttctacgtttaccttccaaatgagcgggttattaccaaatgaagcaacggccgcgcagttaataacgtgcgtaacattgttaatacgcgcgtcagttaaaaagtcggccggctcggaaaggtcgcccaataatatattttcaatcgtaattttagacagcagattcgcatcgatattaaacttttccatattcgcgcgaatacgggccagcccttgctgcgcatcgtctgcacgcaccagcaaaagataattaacagactgattttcaatcaataatttttcgagaaccgcaccaccaagaaagccggtagcgccggtcaacagtagcgttttcatcattgtcacccacattggcattgaatgtggttgattgtatccgcggatatttaaacaaatattaaatagaattacggcgcccttaaacacttttcttaatattatcttaaggaatcttttgaaacatccatcatgggtttagtaacaaaagaaccgcgtagactccatgattaatctccgccgtttaaataccattgatgtagtgcctgattaaatttaacggtcaatgttatttctcttctcgtccgtggaggacttatgacctataaccaaaaaatctggttgggggttttgctgctgtgcaccctgttttgggcggcagtgataagcggcgcctgttcgctgtataatcggacagatcgcctcaatgcgcaccaggcgcagagcgagttcgccgcccgccacagccaggcgccttgcgcgcaacccggtgctcaggcgtcgactgccccccggaatgggtagggacaatatccgctaacgatcctattatgccctaaggttaacagggagataacgatggctcgaaagctggatagcttaccgcaggcgcaacgcgagaaaatagaaaccgatttgctggccatcagcgtgatctacaacgagcgctacggcatcgcctcgacccagacggaaacggaacaacagatccccgaccacctgctcccctactttcatcagcggctggattactatcgccgtgcgtaattgcgcgcatttcgctaaccgccgcttggcatcgctccccacgccgttacaatagaggcatattgtatccgccactgaagagacgcgattttgagcagcaaggcaacggccacattttatattcacgattacgagaccttcggcaagagcccgtcgctggaccgcccggcgcagttcgccggcgtgcgcaccgatatggatttcaacattatcgaagagccgctggtcatctactgcgccccggccgacgattacctgccggaacccgaggcggtgatgatcaccggcatcacgccgcaggtggcgcgcgccaaaggcgttaacgaggccgagttcacccgccaaatccatcaggccttcagcgtggccggcacctgcattctcggttacaacaacatccgcttcgatgacgaagtgagccgcaatatcttctatcgcaacttctacgatccctacgcctacagctggcaaaacggcaactcgcgttgggatctgctggatgtgatgcgcgcctgctacgccctgcgcccggacggcatcgtctggccggaaaacgaagacggtttccccagcttccgcctcgaacacctcacgcacgccaacggcgtcgaacacacgcaggctcacgacgcgatgtcagacgtatacgccaccatcgccatggccaagctggttaagcaggcgcagccgcggctgttcgatttcctgctgcagcaccgcaacaagcacaaactgaacgccctgatcgacgtcgccgaaatgacgccgctggtgcacgtctccggcatgttcggcgcggcgcgcggcaacaccagctgggtgtcgccgctggcctggcacccggacaacaaaaacgcggtgatcatgtgcgatctcgccggcgacatgacgccgctgctgacgctgagcgctgagcagctgcgtgaacggctctacacccgccgcgacgatctggcgccggatcagacgccggtgccgatcaagctggtgcacatcaacaaatgcccggtgctggcgccggccaaaaccctgctgccggagaacgccgagcggctgggcatcgatcgccaggcctgcctgcaaaatctgcagctgctgaaacagcacccggaagtgcgcgagaaagtggtggcactgttcgccgaagccgagccgttcaaaggttccgaggacgtcgacgcccgcttgtacgacggtttcttcagcgacgccgacaaggcggcgatgaggattatccagcagaccaagccgcagaacctgccggcgctggatctggccttcagcgacggccgcatgaaagagctgctgttccgcttccgcgcgcgcaactatccgaatacgctggacgacgccgagcagcgccgctggctgcaacaccgccaggaaacgttgagcgcggagcgcgtgcagagttacctgctgcagctcgaatcgctgtataacctgcacgaaggcgacaaagaaaaaaccgccctgctgaaagcgctgttcgattacggcaaagagttggtgggataaaacccgcagcaagcagaaaaggaaaaggccgcgaaagcggccttttttgtggctgaggagacggctcgcgcttaggcggcgtcttcgctcgcttgcggcaccggcagacggaagctgcgggtaacgaaggccaggtagatcagaccgatggccgcccaaaccaggcccagcgtcatcgagctggcttccaggttgatccacagcgcgccgacggtcagtgcgcccatcaccggcaggatcaggtagttgaacgtgtccttcacggtgcggttcatcttgtcgcgaatatagaactgcgagatcaccgacaggttgacgaaggtgaaggccaccagcgcaccgaagttgatcagcgcggtcgcggtcaccaggtcaaacgacaccgcggacagcgcgatggcgccaaccagcagcacgttcagcgccggggtacgccacttcggatgcacatagccgaagaagcgagtcgggaacacgccgtcgcggcccatcacgtacatcagacgcgaaacgcccgcgtgcgccgccatgcctgacgccaataccgtcacgcaggagaacaccaggatcaccgactggaagaacttgcccgccacgtacagcatgatttcaggctgcgacgcgtcaggatccttgaagcgcgagatgtccgggaagtacagctgcacgaagtaagacaccacgataaagatgatgccgccgatcagcgccgtcaggaagatggctttcgggatcactttctctgcgtctttggtttcttcggacagcgagctgatgccgtcgaagcccaggaacgagaagcacaggatggtcgcgccggtaatcatcggcaccacgtgagcgttatcggaccagaacgggcggctgctgaccagcgtaccggcgccttcgccgtggtaaacgccgttgatcaccagacccaggaacacgatcatgatcgccacctgtaccaccacgatgatggagttcaggttggccaccagcttgatgccgcgcaggttgaaaatcgtcatcaacccgaccagcaccgccacgaagatccaggacgggacgcccgggaagatcgcttccaggtaaatcttggccagcaaaatgttgatcatcggcatgaacaggtagtccagcagcgatgaccaacccaccataaagccgacgtgcgggctgatggctttctgggcgtaagtgtaggcggaaccggcggaagggaacttcttcaccagcttgccgtagctcagggcggtaaacaggatcgccagcagagcgaaggcgtacgcggtcgcgacgtgaccatcggtcaggccggatacgatgccgaaggtatcgaagatggtcattggctgcagataagccagacccatcatcactaccggaactaatgtcagggttttacgcagctgagtgcgctgagccggagcggcgttaagggtgttatcggacattgttcagcccccccttaccttgagccttgcggatggcggacacgccaagacttaaggttgcggggaaacttcgcaacgagcgacttaattctaaaagaaggggattgtaagctggataacgggtcgaggtaacctcggctgctccatagtcgctgcggccacagcggaaaccggcgggcaccggcgctaaagtgaaaaattgccccatctttctaatcctcatgagtcacgaccataaagttttgtttgatcgtgcacgaaactatttatctatccggatcggtgtccggcctcgcttggtgtatgaaacgctacgttggtaaaacttaatgcaaaaaaaataaccgacgctttcaaaacgtcggctatctgcatttgagatattttgcaccagaatgcctccggatgacaagatccggaagccctcaaatacaaattctttttgtcgatcgaacggaaaaccagcccggcaggcgaattaatccgctaccggcaggccggtcgcccgcacatacttcttactttatacgcccattcaggcatttttcaacatccagtcgatctcggtttccgtcacccgccgttcaaactgcagcaattcgtccgtcttgcaggcgtgataaacttgggtgaaacgctcgcccagatagtgggtcaacgcatgctgatgttcaaactcgtacagcgcatcgctctggcggatcggcagcggcagcccctcctgctccagcccgttgccggtcaccggctcaggcaacggcagcgcgttgtccaacccgtacaacatgccggccaggatcgccgccatcaccagataggggttggcgtcggcgccggccacgcggtactccacccgatgattctccggttcgccgcagggaatgcgcagcgccacggtgcgattgttgtggccccaggcggcctggatcggcacatacatccccggttggaaacgccgataggcattgacgttcggcgccagcagcgccatcgacgccggcatcagggtgatcatcccggccagcgcctgtttcagcaacggtgaatcctcgccttcgccgtcggcaaacaggttgttgcccgccccgtcctgcatgctgacatgcacatgcatgccgctgccggcgtaatcctcatagggtttggccataaaggtggcgtgcataccgtggttctcggccaccagccgcaccaaccgtttcagcgccagcgcgtggtcgcaggccagcaagatgtcgtcggaatggcgcaggttgacctcgaactgccccggcgacgcctccgccaccgcgccgtccgccggcagcccctgcagcttcgccaacgcgtcgatatcgttcagcacctcggcgaaatggttcaggttatcgacggagtacacctggctttgggtattgcgctcctgagtgccgggcgcacacggcggctgcaaatcgccttctgcgtcgcgctgcctgtcgatgagatagaactccagctctaccgctgccaccgggaacaagccgcgctgtcgcagcgcctgccacacgcggttcagcacattacggggttcaacgtcaaagggagtgccatcttcatccagcatggtcagcaacacctggccgatatgctccggatcggcggccgacggcgtcagcgaaccgggcaccggcaggcaaatgcgatccggctcgccgagctcctgcccaagaccggtctcctccaccacgttaccgaggatgtccatggcgaacaccgacgcggggaagtagctgcctttttccagttttttcaaccctgagacgggtatacgtttgccgcggaaggaaccattgagatcggtaagaaggatatcgacatactgcgtggcgggatggcgttccaaataatgagcaacctcattttggaacgcgctacttcgcctctcttcatgatgctgtgcaaaatgttcaactgctgcgctattggtttgcatacgtcacccgccattatgctcttaaggcgcgttagcgcccgtccgccgttcgattcaacacatgattggatttctcgccaggtcgcgccgctggcgggcgctcaaaataacatccacaatatgaaacatagtattaacagaatgggtttgcaaatgttacaatcctgtttgattattcaccaccggctgctaaattgataaaatattgaccgaaaaggccttgctgccatttttacgtcaactatttcgtccaacgcaccgagagtgaacatgggcaatatattttccaaacctgccctaactatcgatatcatgcagcatcgttatcgcccagacaggcgcccgataacgatattcatgtctgcctgtcgcccctaccagaaggaagtaccgctatgagcgaagccagcttggcaccgggcaaacgcctgtcacagatccgtcagcaattgggtttgtcgcagcgccgggtcgccgaactgtccgggttaacccacagtgcgatcagcaccatcgaacaggacaaggtcagcccggccatcagcacgctgcaaaagctgctgaaggtgtatggcctgtcgctgtcggaattctttgccgaaccggaggccgtcgacgagccgcgcgtggtgatcgacgccgaggatctgattgagatcggcagccagggggtgtcgatgaagctggtgcacaacggcagccctacgcgcaacctggcgatgatgctggaaacctaccagcccggcaccaccaccggcgaaaagatcaagcatcagggcgaagagatcggcaccctgctggaaggcgagatcgtgctgaccatcaacggccagagctattgcctgagcgccggtcagagttacgccatcaacaccggtattccgcacagcttcagcaatacgtcggctcgcgtttgccgcatcgtcagcgcacacacccctaccaccttctgaccgcttctcgcaccggcgcagcctgacgcgggttgcgcccctgcccacccacgattttttcatcgccgttatgccattttgttggttgccaacggcgcaatctatgttacaacagagcaaaacagccatctaaacatctaaacggccttaacaccctatgtcaaccgcaacgccttcacgcctcgagatgcgcaatatctcgatcgccttcgccggcttcaacgcgctgcaggacgtggacttcacgctgcagggcggatcaatccatgcgctggtcggcgccaacggcgcgggcaagtcgacgctgatggcgatcctctccggcgcccacgatcattatcgcggcgagatcctgatcgacggccagccggtggcgatccactccccgttgcaggcgcgccgtcacggtattcacgtggtgcagcaagaggtcgacgtcgcgctgatccccacgctgtcggtagcggaaaacatcatgctggactggctgaacgagccgggccactggctgaactgggcggagctgcaccgccgcgccgtgcagctgctgcagcaatgggcgctgccgctcaacccgcgcagacgcctggcggactgcacgctggcggaaaaacagcaggtgctgctggcgcgcgcgctgtcgcaccgctgccgttttctggtgctcgacgagccgaccgcgccgctcgatcgcgccgagagcgagcgcctgtttaacgtggtgcgccgcctgcaatccgaaggcatcggcatcgtgtttatttcccaccgcatccacgaactgagcgacatttgcgatcggctgacggtgctgcgcgacggccggcgcgtcagcgaagacgccatgcgcgggctgagcggcgaacagatcgtcgagaagatgctcggccatcggctggacgacattttcccgccgccgcgcccgccacaccctgagcgaacgctgctgcaggtgcagggcttgcacgatcgccataagctgcgcgacgtttcgctgcggctgcatgagggcgagatcctcggcatcgccgggctggccggggcgggcaaaaccgaactgtgcaaggcattgttcggcgccagcgccgtgcagctcgagcgcggcgaactgcgcgggcagccctgggtgccacgcgcgccgcacctgtcggtcgaacaaggattggcgctggtgccggaagaacgccgcaaagaaggcattttcatcgacgaggcgatcccgatgaacctgagcgtcagcgccgacgacagcttctcgcgctggagcctgttcagccggcggcaagagctgcgctgggcgcgcgagatcatgcagcgtctgaatattcgcgcctccggcccgcaacagcggctggcgcgcctgtcaggcggcaatcaacaaaaagtggcgatcggcaaatggctgcgtggcgacgccgaggtgctgatcttcgatgagccgaccaagggcgtggacatcaaggccaaacaggagctgttcagcctgatcgacggcctggcccgcgccggcaaaggcgtgatttacgcctccggcgagttcgccgagctgattggcctgtgcgatcgcatctgcgtgctgtgggacggccgcatcgtggcggaattgaacgccgccgacatcgacgaagaaaccttattgctctattccaccggaggaacccctgcgtgagtaaagaatttgccttgcggcctgcgctgccctggcgccaacagctgtttgatttcctctacaagtggggcatgctgctgaccgtagcggcgctgatcgccctgtttggcctggcgtcggacaactttctcgatgccaacaacatcatcaatatcctgcgttcgatcgccatcgtgacggtgatcgccatcggcgtctccatctcgctgtcggtcggcggtttcgatctgtcggtcggttcgaccgcctcgctggccaacgcgctggtgatttcgctgttcgtctggcacgggttcggcaccgccggcgccatcgtagtgacgctgttgctgtgcacgctggtcggcctgttcaacgccctgctgatcgtggtgttcagaattcccgatatgctggcgacgctggccagcctgttcgtgatccagggcgtggcgatgacttacagctacggcggctccatcacccaaaacatggtgctgccgaacggcgacatggcggaaggcccgatcccggaagtgtttgccgctctcggtcaggtgccggtgatcgtgctgatcatgctggcggtcaccgtggcggtgcagctgttcctgtcgttgaccaagcacggccgccgcatgtacgccatcggcggcaaccccgaggcggcacgcctgtcgggcattcgcaccgtgcgttacagggttgcagcttacgtcatttcctcctggctggcggcgcttggcggcatcttgctggcgtcacgtattggctcttcgcaggtcaatgccggcggcggctatctgatggacgcggtggcggcggcctatatcggcttctcgctggccggcgccggcaaacccaatgcgctcggcaccctgatcggcgcggtgatcctcggcgtgctgcaaaacggcctggtgatgctctcggtgccctactacgccatggacattatcaaaggcctggtgttggcgctggcgctggccatcacctatatccagaaacgctgatcctctccggcgcacgtctgctgcgccgcttttccctttaattcatccggttactctttcccgccagaataacaagcatacaaatgatatgaattatcattatcgtttacattcagtaaaaaatccttacaatggcctcacgcaacgctgacgaagcgacggatttctcagcgaacgatgaattatttcattagaaattcaattggttaattactttcacttcaatccaggaaaggtttacctcatggaaacgccacgttacagcaagctcgccgctctggtgatcgcctcactcagcgccaccgccgcactggccgcgccgcaggacgacacccaagacaccatggtcgtcaccgcctccggcttccagcaaaaaattcaggactccgccgcctccatctcggtgatcccgcgccagcagatcgaagataaggcctatcgcgacgtgaccgacgcgctgaaagacgtgccgggcgtagtggtcaccggcggcgccagcagcagcgacatcagcattcgcggcatgtcttccaagtacacgctgatcctggtggacggcaagcgcgtcgacacccgcggcacccggccgaacagcgataacgccggcatcgaacagggctggctgccgccgatggaagccatcgaacgtatcgaagtggtgcgcgggccgatgtcttcgctgtacggttccgacgccatgggcggcgtgatcaacgtcatcacccgcaagacctcgcgcaccgagtggaaaggctcgctgcacggcgacgccacccttcaggaaaaccgcgattccggcgatctgttccagaccaacgcctacgcctccggcccgctggttgaaggcctgctcggcctgcgggtcaacggcctgctgtcgcgccgcgccgaagataaaatcaccaacggttacaacgagcagcgcatgcgcagcggcaccgcggtgttcaccctgaccccagacgagaaaaacgaattcgacttcgaaatcggccgctcgctgcaggatcgcaacagcacgccgggcaaatcggtggtagcggaacgctgcagcaaaggcaaatgcacgccgacatcgcgcagcgaaagcctgtatacgcgcaccaactacgcgctgacccacaacggctattacgacttcggcaactccaccagctacgttcagcgggaagagaccaacaacccgggccgcaaaatgaagatgtacaacaccatcttcaacacccagaaccagttcgagctgggttcacacatgctgaacctcggcggtcagtatcgctatgaaaaactgagcgacagcggcaaccagcttgaatcggcacaaggtctcagcaagctgacgcgctggagctgggcgctgttcgccgaagatgagtgggcattgaccaacgacttcagtctgacgaccggcatccgcatggatcaggacgaaaacttcggcagccactggacgccgcgcatgtacggggtctggcacctgaccgaacagtggacgctgaaaggcggcgtctccgccggctacaaatcgccggatctgcgccaatcctccgccaactggggccaggtcaccggcggcggcgtgcgtaaaggcatcatcgtcggcaacccggatctgcagccggagaagagcctgagcgaagagatcggcctgatgtgggatagcctgaaaggcgtcaacgccggggtgaccgtcttcaacaccgacttcaagaacaagatcaccgaagtgcgccgctgcgaagacacgccggactgtaagatcggcaatgacgtctacgactttatcagcgatcgcgtcaacgtcgacaaagccaatatgcgcggcgtagaagccaccttcggctggcagatcaacaaagactggaagtggaacaccaactacacctacacctcttccgagcagaagagcggcgagttccagggcaaggcgctcaaccagatgccgaagcacatggttaacaccgtgctggattggcgcgccacgcaggacctcagcctgtggtcgcgcgttaatttccgcagcaaaacgtctgagtatctgagccgtacctcgatggccaagagcacgccgtcctacaccttcgtcgatgcgggcctgagctaccaggcggcgaaaaacctgcagctgaccggcggggtctacaacatcctcgacaagaccgtggattacgatcactacaacaccacgctggacggccgccgttacaccgtcggcatgacctacaacttctgatgcccccgggcgcgcgctgcgcgcccttttcattccatcaccgtgaggaagccccatgaaattacgccgctcccccctgatgatcgccctgctggccgcgatggcgctggcgggttgccacagcaaaaccgacgcgccggcggccccggccaccgtcaacgttcagcacctgaacggcagcaccgaggtgaagaaacacccgcagcgcatcgtggtgctggattacgcctcgctggaaacgctgcagctgctgggcgtcgagccgctggcgctgcccggcaatcgcaaaaacttgccggatagcctgaagcgctatcaggacgacaaatacctcaatgccggcaccctgttcgagccggatatggccgtgctgcgcgccgccaaaccggatctgctcctgatcgccggccgggcgtccaaagcctatgacgagctgaacacgctggcgccgacgctgaatatgtccgtcgatcagcaggatcagttgggcagcctgaaacagcgcacgctgcagctgggtgagctgttcgataagcagcaacaggcgcaggcggcggtcgataagctggatgcgcagatcgcggcggtcaaaccacaggccgcccaggccggacgcgggctggtggtgctgttctccggcggcaagatcagcgcttacgcccccaagagccgtttcagcttcgtctatgacgccctcggcttcgcgtccgcgttgcagtccgatgaaaaagacgtgcgcggcaacaagctgacgcctgagcaggtggccaaactgaatccggactggctgttcatcatcgacagagacgccgcgaccgggcggccgaacgcggtggcgccgcagaaaatccttaccaccactgcgctgaagaaaaccgcagcggtgaagaaaggccaggtggtttacctgccggcggccgaggtttatctgtccggcggcatcgtcaccgcccagcacgtcgtcgaacgcgtgagcgaggcgctaacccacgctgcgcgataaaaaaagcccggcgatgccgggctttttcctggattaaatcgtcggctggtttaccaggccgtcgatcagcacctgcggcgtgccctgcgaacaacgctcgatgcgcccgcgcacgccgtagacccgcgccaggctctgcggcgtaatcacctgatccggcgcgccgtcggcgatcagatcgccatcctgcagcatcaacacgtggtcgccgtggcgcagcgcgatgttgatgtcatgcaccaccaccaccgtcacgatattgcgcttgcgggtttcacggcgcaccaaatccatcacgtggaactggtagttgagatcgagcgcgctcagcggctcatccagcagcagcagcgacggctgacggatcagcgactgcgccaaccccaccagctgtttctggccgccggatagttgatcgaggtagctcagcgccaggtgggcgatgcccagctgttccagcaaagccatcacttccgcttcgctgccggcgttgctgcggccgcccgaggcgcgctgcgccacgatgatcgactccagcacgtgcagatgcaccccggcgggcagcgactgcggcaggtacaccactttctccgcccgacgggcgaacggcatctgcatcagatcgccgtcgtccagccacagcttgccctgcgccgggttcagcccggccagcgagcgcagcagcgtcgatttgccgctgccgttcggccccagcagcacggtgatttgcccgcgcggcagcatcggcaccgagagattgtcgatcacctgacgcttcgggtagcccgccgagaagttttctatgcgcaagccctgattcatacgttcccccgatggcgcagaataatgctcaggaagaacggcaccccgaccagcgaggtgacgatgcccaccggaatgatcacgccgggcaccagatttttggacgccaccgaggccatcgacagcaccagcgcgccgatcagcgcgctggccggcaggtagaaacggtgatcttcgccgaagatcatgcgggcgatgtgcggcgccaccaggccgataaagccgatcggcccgacgaaagccaccgccagcgccgagagcatgctgatgcgcagcagcgtggtcagccgcagacggcgcacgtcgatgccgaagctcaccgcccggtcttcccccagacgcagcgcggtcagtttccacgagctcatcatcgacagcggcagcagcacggcgaataccccgaacagaatacccagcttgtcccacgaggcgcgcgccaggctgcccatggtccagaacaccagcccctgcagcgtgtcctcgctggcgatgaattgcatcatcgagaccagcgcgttgaaggtaaacaccagcgcgatgccgaacagcaccacgccggaggtggcgacccgcgtccagcgcgtgatgccgtcgagcatcagcgcggcgaacagcgcaaagataaaggcgttggcggagatgaaccactgatcgggaatacccggaatgccgatgccgagcacgatcgccagcgcggcgccaaaggccgcggcggatgatacgccgagggtgaaggggctagccagcgggttattcaggatggtctgcatttccgccccggccagaccgagcgcaaagcccaccaccaccgccatcagcgcatagggcaagcggatgtcccagacgatcacccgcgtgccggcatcggccgcggcggggtcaagcagcgtttgccacaaagacgacagcgacaggccggatggccccatggtgaaatccagcagcagcgaacccaggatcgccagtgccaacacgcccatcatcaacaggcgatggcgaagaatatgctgataacgccccatcacgccggcgttgggttgccccttggcgtcagtcatgggatcggtggatacgctcattcgttaagatacctgttacaaccatcatgacagcggcgcgaaggcgtccgccgtaaaccggaaagcgcgcggcgaccgcctgcgcgcagccgcccacaataaagcaaacgataatacttatcaatcatatcaataggtgaaaacagcgttgtcgaaatgtaataatttgttttttctcgccatttttcaaaccaccacgctttcccccgccaacggccagtaggttaattattctgaaaattattcctgatccgaccagactctgacaaatagcggcaaaaccacatagaatccaaaaccacagcaccgcgcgtgcaaaaaactttcaggccgccgcaagagcggccttattgacgaggctgtaatgagaagtccatctccggcggtaacgcccaaacgcccggcgctgctgaactggctgttgcacagcccgctgcacgccgatgacgaaccgtttcaacgccagctgcgtctcacgctgacgccctctcctctcaccccctggctgaatgccgtggggccggccgcgctgttggtggggtacgcctggctgaaccaaccgctggtcggtatcggcctgctgctgctgttgctgctgttgaccgccgggcgtgccaggttggcgcaaaggcgccaacccgcttggccgaacgccatgctggtgacggtgttgttgtgggcgctgctggttggcgccagcgccgcgctggcgatgctgtcgggccgcttcgtgctgatcctgttcgccggcctgaccatcaccgccctggcctgctggttgatgcagcgccatgccgccgcgccgcgcttcgcgctgcttgaggtgatcgcgctgacgctgccctacctgctggcggcgccgctgtcgcgcgtgcaaaatctgtttgtcatggcggatctcgcgccgctgtggctggtgctggcccatggcatgatcgcgcgctaccaccgccagttggtgcagcacgtcacgctggcctgggagaagcagcaggcatcgcaccgcgatcgcctgaccggctttctcaaccgcgcaggcggcgaggtggtgatgcgcagcatctgccgccccgcaacggcgcagccgatctcccacctgttcattcttgagttcggtccgctggcggcgctctaccaaagccatggcgtccagatcggcgacgacgtactgcgcaccgtcggcgagcgtctcaagacgctgatccgcccgagcgactacgtctgccgctataccggcggcctgtttttgattctggtgcacgatctgccctacggcgcggaaagcgagtttctggcgcgcatcgtgccaccgctggaagcgccttacgattttggcgcattcggcgaggtgaacatgcagctcaacgccggcattgtggcgctgacgcagcattatgcgacggtggaagatttgatgagttcggcgcagcaggcgctggcggaagccaaaggcgggaaaaagtaaagccaaacgcggcgggaacccccgccgcgtatcactcaccgaaaattacttcacgtccatcttcggaaattccatttcgctgtacttcacgacacgggtgccttgcgacagcttgtaaccgaaccagatcagcaggaacagcggaatgccgatgtaggtcgcggtcacgccgtaccagtcaatcttgtcttgcaggaaggcctggtagttctgccccagggtaatgatcaggcacaacacgaaggcgaagatcggccccagcgggaagaacccggaacggtacggcaagtcgttgagatcgtgtccctgcagcatgtaaccgcgacggaaacggtagtggctgatggcgatgcccaaccaggcgatgaagccggtcatgcccgaggtattcagcagccacaggtaaaccgactggttgccgaacatcgaggtcaggaagcacaacccggccaccacgcaggtcgcgtacagcgcgttgcgcggcacgccgcctttcgacagcttggcgaagatgcgcggcgctttgccttccgatgccagggtgtacaacatgcgggtcgatgcgtacatgcccgagttaccggccgacaacaccgccgtcaggatcaccgcgttcatcaccgccgccgccgacagcaggccggcatgctggaacaccagggtgaacgggctgacgctgatgtctttcacgtcattgcgcagcaggctcggatcggtatacggaatgatcaggctgatgatcaggatggcgaagatataaaacagcaggatacgccagaacacctgacgcaccgcgcgcggaatatttttacccgggttttccgattcgccggccgcgatgccgataagttcagtgccctggaacgagaagccgacgatcatggccacgccgatcatcgccgagaagccgccggcgaacggcgcatctccaatggtccagttctgccagccggcatgctcgccgcctttcagaatgccgacaatcatcagcacgccgacggcgatgaaaataatcacggtgctgaccttgatcagcgcgaaccagtattccgcctcgccgaaccctttcaccgaaatgtagttcagcaggaacatcaggccgaggaacagcgcgctccagatccagccgggcgtgtccgggaaccagtagctcatcaccaattgcgaagccaccaggtcaacggcgatggtcaccgcccagttgtaccagtagttccagcccagtgcgaaaccgaagccttcttccacgtatttggcgccgtaggtggagaatgaaccggagaccggcataaaggccgccagttcgcccagactggtcatcaggaagtacaccatcaaaccgatcagagcgtaagacagcagcgccccgccgggacctgcctgagaaaccgtggcgcccgaggcgacgaacaggccggtgccgatggagccgccgatggcgatcatggtcaaatgccgggctttcagctcgcggcgcaatccgggtgcttgctgccccgatgtttttatatcctgctgagccattcgttccctatctatctgctcttcgaaaaatgagggcggattgtaacaaatacccgccggtgaactagcaacattgcaccgatataagatagcttcataattcagaggcaattattagccgcgccccttatggccttacttactctcattaatgtgagcgcgcgcaggtttttatgctttctttggcctgcgcggcgatagaagacgtgacgcgctgtcgattacagcacgcaatagctgagaaaacgctgcaacgcgttggaaatgtgcttttgccgatggcggatcaggtacagcgtgcgccgcagcggcggcagcggcaccggcagttccaccagcgcgccgctggccaactgttccgccaccacccgccgggacaggcagctgatgccgataccgtgccgcaccgcatgcttgatcgcctccgagttgccgagctccatcaccagctgaaagtgcggcaggtgtgccaacagcagatgatccagcacctcgcgggtgccagaaccgcgctcacgcaggatccaaggcgcattcgccagcgcctccagcgtcggcggttgacgggtcagcgggttatccggcgcagcgaacaccaccagctcgtcctccagccacggctgcgtgaccagctccggcatatggcaaggcccttcgatcagccccagatcgacgcgaaaatccgctaccgccacgatcacatcctggctgttgccgacgttcagctccagcggcgtggccggaaagtcccggcggtaacgggcgatcatctccggcagcatatagttgccgatggtgctgctggcggcgatgcgcagcgccccgccatcatggcgaaacagctgctcgatctcccccgcctgctccagcagcgccagcgccttggggtacagcaagcggccgtgttcgttgatcaccagccgtttgccgacgcgatcgaacagctgcacgcccaactgcccctccagatccgccagcgccgcgctgaccgccgactgcgacagcgccagcaccaccgaggcctgagtggtcgaaccgcttttcagcacttcggtgaaaacttccagttgacgcaacgtgatatgcatagccgtcccggtattgaaagaaggttctgccagagaaccccaacatggtgatgtgggcagcccggccaggctaccccgtttgcggccagatcggcgcgctatttgcccaaggcgaccagctgcgccgccgcggccagcaccggctctcgcggcgtgccggcttcgtcccgcagtatcaattgcagcatcgccgcgagatgctcgcggtcgatcgtcttgttttcttcaatcaaccgccgcaccgcgcgccccacttcctgatctacctgctctctgcgttgatcgtcggtatccatcgcctgctcctgttagttggaaagttgacggcggctcgccgcacttcctcaccctagccgcaatgcggcgttatgccaatgcctgatcccataccacttattcagataggttataaatatataatcaatttctcttttattcagcccaaacgtactcttagcagcaagaaacagactgaaggactgacttttatggcgactgataccactcacacttatcccgagcgacgcttttcgctgtttggcctgccgcggctggtgccggggctggcactgaccggcgcgctcaccgcgctggccgtctgggccggcgatattccctgggtggcggagctggggctgggggcgctgacgctggcgatcctgctcggtattctggtgggcaacacgctgtacccccactggcaaaccgtttgtcacagcggcgtacagctggccaaacagcgtctgctgcgtctgggcattatcctttacggcttccggctgacctttcagcagatcgccgacgtcggcgccagcggcatcatcatcgacgcgctgactctgatcaccaccttcctgctggcctgctggctcggcaagaaagtgttcggcatcgacagccaaaccgcgatactgatcggcgccggcagcagcatttgcggcgcggcggcagtgatggccaccgagccggtgctgaaggccgactccagcaaagtggcggtagcggtctcgaccgtggtggtgttcggcaccctggcgatcttcgcctacccgtggctgtatcagttgaatgaacacttccagtggctgccgttcagccaggaaaccttcggcatctacgccggctccaccattcacgaagtggctcaggtggtcgccgccgggcacgccatcgggccggacgccgaaaatgcagcggtgatcgccaagatgatccgcgtgatgatgctggcgccgttcctgctgctgctgtcgggctacatcagccgcggcagcgcaggcaaggcggaaaaatccgccatcaccattccgtggttcgccgtgctgtttatcgccgtcgccgggctgaactccttcaacctgctgccggccacgctggtgcgccatctgatcaccgccgacacctggatgctggcgatggcgatggcggcgctggggttgaccacccacatcagcgccgtgcgccaggccggggtgaaaccgattctgctggccacgctgctgttcgtctggctgctggtcggcggcggcgcgataaaccaactggtgcaacactggttctaaactccccttctgcggcccgcttcggcgggccgcatttattccgcccgccatcaatgccataatgtcaccgataacacaggagaatgaagatgaagtttgtcggtgcacatgtcagcgcgtcaggcggcgtggatcaagcggttatccgcgcgcacgaattggaggcgaccgcgttcgccctgttcaccaaaaatcagcgtcaatggaaggccgcgccgctggccgcggacgtgatcgataagttcaagagcgcctgcgcccagtacggttatgggccggggcagatcctgccgcacgacagctacctgatcaacctcgggcacccggtggccgaggcgttggaaaaatcgcgcgaagcgtttatcgacgagctgcagcgctgcgaacagctggggctgacgctgctgaacttccaccccggcagccacctgctgcaaatcgatgaagataaatgcctggcgcgcatcgccgaatcgatcaacatcgcgctggacaaaaccgccggtgtgacggccgtgatcgaaaacaccgccggccagggcagcaatctgggcttcaaattcgaacacctggcggcgatcatcgacggcgtggaagacaaaagccgcgtcggcgtctgcatcgacacctgccacgctttcgccgccggttacgatctgcgcaccgaagagacctgcgaacacaccttcaaacagctcggtgacatcgtcggtttcaactacctgcgcggcatgcacctgaacgacgccaagagcgagttcaacagccgcgtcgaccgccaccacagcctgggggaaggcaacatcggcaaaacggtgttcagctacatcatgcgcgatccgcgtttcgacaatatcccgctgattctggaaacggtaaacccggatatctgggcggaagagatcgcctggctgaaggcgcagcagtaaccctcccttggccgctcgcctatgcgcgagcggtttcccccaccgtgtgctctgccgccagcatggcgccgaactgacgcagcgtctctgcctccaggcccgccgccctaaacaccgcggtggtaaagctgaccggcgccgagcccggtgccgtaatgacacggtcatccacgacggcggcggcgctcgcaacgtaatggcgctgcccgctgtagccctcaacattgcgcgtcaagaactcggcatcgttggaggtatgcgccctgccgttcaacaggccggcccgcgccaacgccaacgtcccgccgcaaatgcccgccagagtcgcgccgcgttgagactgctcgttgagcaacgcgcggatatccggcgcccgttcggtttcccacagggtgccaccgaccaccaccagcacctcggggcgccaatccgccagttcggccacgcttttttcaacctcgaccgtcaacccgccctgtgagcgaagcgttccggcctgcggcgcaaaaaacgccacctccagcccataaaacgggccgccaacgccggcaatcagcgcgtattcccaatcggcgaaaccgggtgtcagtacgatcgccacttttttagccacggatgaatctccttgagtcattgcttgttcgcaggaacaaagtcgcgctatcagcttagaaagcgttgtggtttctgaccaggggtaatcgtgctaactgcctaaggcacaaacaaaaacgcgcagcccggggctgcgcgttttgcggtatcgcgaggcttacgccgcggcggtagccggtacttcagcacgtttcagcagggcatacgctacgcccgccagcagcgtaccggcggcgatcgccaccaggtacagcaacaccggcgaaatcgcgcccgggatcagcagcacgaacagcccgccgtgcggtgccatcagtttggcgccgaaggccatcgacagcgcgccggtcagcgccccgccggcgatgcagcacggcagcacgcgcatcgggtcgcgggcggcgaacggaatcgccccttcagtgatgaagcacagccccagcaccaacgccgccttaccgccttcctgttcggatttcgggaacttgcggcgcgccagcagcgtcgccagccccatcgccagcggtggcaccatgcccgccgccatgatcgccgccatcggcgcatacaccgaagagctgagcagcgccacgccgaacgcgtaggccgctttgttcaccgggccgcccatgtcggtacacatcatgccgccgaggattgcccccagcagtacggcgttggcggtacccagcgattgcagccaatgggtcagaccttccatgatcttcgccaccggcgtgccgaccacgtaaatcatgatgaggccggtgatcaggctggcgaccagcggaatgatcaagatgggcttcagcgcttccatactttgcggcaggcgcagcttgctgctgatcgccttggcgacgtaacccgccaggaagccggcgatgatgccgccgaggaacccggcgccggtgctcactgccagcatgccgccgatcaggcccggcgtcaggcccggacgatccgcgatggagaaggcgatgaaaccggccaacaccggcaccatcagcgcaaaggcggagccgccgccgatctgcatcagcgccgccgccagcgtgcctttgacttcaaacgccttgatgccgaacacgaaagacagcgcgatgcacaaaccgcccgccaccaccatcggcagcatgtaggacacgccggtcagcaggtgacgatacgggccgttgccctctttctttttcgccgccggcgccgcgccaccgcgctgctgcggctggaacacttcggcttcggcctgcgccttgtccagttcctgggcggttttcttcagcgccagaccggtggaagtacgatacatcggcttaccggcaaacttgtccagatccacttcgatgtccgccgcgacgatcaccagatccgccgccgccacttcttccggggtgatggcgttgccggcgccgacggaaccgcgcgtttccaccttcacccaccagccgcgtttcttggcttcactttcaatggcttcggccgccataaaggtgtgcgccacgccggtagggcaagcggtgatcgccacgatgcgtttttgcccattggctttcaccggtgccgccgcctgcggcgcctgataggtttcagcttcggccttggcacgcgccagaaaagcgtccggttcccgcaccgcctgttctacctcgcccacatacaccaatttgccgttcagcccggcgtcagcaggagcagcctgccccgccaccgccaccagttcggcgtcctgcagtgactcgaccagcgtcaggccagttttggccgcggcggcctccagcatgcgtttcgccaggtggccacgggcctgccccagcgaactgtctaccatcagcagcgttttcattctgcctcctgctattgattgaaaggtttcagatcgacgcgcgccatcatcgcggccaactggggacgatcggtcacgccgacgttgctttggctgaccgccagcgccgctaccgccgtggccagacgcagagtgtgttcgctggattcgcgcatcagcaggccgtaaatcaggcctccgaccatcgaatcgccggcgcccacggtgctgaccacctcacaggacggcggtttggcgatccaggcgccggaggcgttaacccacagcgcgccttccgcaccgagggagatcaccacgtgggcgatgccctgctcgcgcagcgcatgcgcggcctcaaccacgtccgccagcgtcggcagcgggcggccggcccagatttccagctcgcggcggttcggcttcaccagccacggcgaggccttcaacccggcgaccagcgcttcgcggctactgtcgaaaatgatgcacgggcacttggcgcgcagctgggtcatccagtcggtaaatgcgtcaggatcgacgccggccggcaggctgccgctcaccgccaccatgtcgaactggcccagccagctcagcgagtcgctgacgaagcgatcccagtcctgcggcgtcacttcgaaaccggagaagttgaagtcggtgacttcgccgtctttttccgtcagcttgacgttgatgcgggtacggcctggcaccacctgaaagcggttggcgatccccagatcgctgaacagcagctggaaaccgtcctgattgtctttgcccaggaagccgccgacggtgacgtcgatgcctaaatccttcaacaccttggcgacgttgatgcccttaccggcggcgtgcaggccggcggtttttacccggttgacttccccgcgttcgatctgcgggcagaaacccaccagatcgtacgccgggttcagggtgatcgttgctactcttctgctcatgctgcgccctcgcccagtccttcattaatcgcttcgccaatcgccttcagcgcggcttcagcatcttctccattggcggtaaagcgcaggtgatgccctttcttcacgcccagcgccaccaccttcatcaggctgcgcccgttggccggcttgccgctgccgtccaggttggtgacggtgatgtcactgttgaaacttttgatcacgttgaccagcgccgtgcccggccgcgcgtgcagaccgtgctcgttgcggatcacgaactcggcgctcagcacgctgctctcctcagccacttcgctggtcagcagcgccagcacgccggcggcatccgccttcagcaagcgttcagctttattggccagcagcagatcgctgaggtagttgagcaccgccagcggctgcgcgtcggcgaccgacaccgtcagcagcagcgccaccggctcgccgtcttccacgaaagcctgcgccgggcggctaacggtggccgcgctggccaggttgccttcgacgctgtcgctcagccagatgccctgccccaggttcagcggcttgcgggtgatgacatcgctgacgaactgcgcgttgaccgcgccggccttttgcagccggccggcgttcagcgcctgcagcgtcatcaggctgtcggcggcgacgtcgagcgcaatcagcgaaacgtcgaactggaattcggcgctctgctgctcgcccatcagcaggctgcgcagctcttccgcagaggtggtttgtgccagccgctccgccacgctgtcatcgctcaggacgtgggtgagctggcgcagcagcgccaaatgctcgtcggagcgggcggcgatgccgatcgccacataggcggtctggccttcgccccacgcaatgccctgcgggaactggaacacctgcacgccggttttcaacaccagatcgcgggtatcggtggtgccgtgcggaatggcgatgccgttgcccagataggtggacgtctgcagttcgcgctgcagcatgccgtccacgtaaccggcgctgacgcagccggcttcggtcagggcggcggccaccaggtggatggcctcttgcttaccgtcggcaacggcgcccagatgaatgtcttgcggtgacaactggaacatgattctcctctcctgctgaattgaatcgtttcagcttcattgagaaaaaggagcgttatccgttcgtcataagcggccggacaacgctgaaacgtttcaaggagtgtgtgagcagcacaaggcgaaagcaagctttctccctttcgccattgcagatttttgagcttacgcacactttttccggcgtattggccagcgccggggcaaaatgacatactgtgctgaaagcttgctgacggagaaaagcatgaacgtagtgacaggcgtcggggtgatcatcgtcaacccgcaaggcgagattttgttgggcaaacgctgcggttcccacgcgcccttttggtcgatccccggcgggcatctggatgccggtgaaaccttcgagcagtgcgcccagcgcgaaatcgccgaagagaccgggttgctcatcgacccgccgcgctttgttggcgtcagcaacaatctgcaaacctggcgcgccgaaggcaaacacacggtgtcaatctgcctgcaggtggatcaccccggcggcaacgccgagctgagagagcccgagaaatgcgccgagtggcgctggtgcgcgcctgaagccctgccggaaccccatttcgaagccagccgcaccgccatccgcctgtggctgagcggcctggcctatttgcccacggcctgacccatcgcgagcgcgtgctgcgctcgcttcccctgccgcagcgccctatcgctatataaattggaatataacgctattttttgcgatatacgccatttttttgactacggataaccctatggggttaaccctcttctatcattacccctgcaatcgacgtggcattctgacctccggtcggcggccttttggcaagattttattttaaattcataattataagcgggtttaccatgagcaaaaaactgactggctttgaaaaaaagcgtcggtggggatggctatggcttttgctgctggggattatcctcggcgcagcgctgttggccgggaccgccaccgtcttccataaaaccagcgataccgccttctgcgtttcctgccacaccatgcaacagccgctggccgaatatcagggcagcgtccacttccagaacaccaagggtatccgcgccgagtgcgccgactgccacgtgccgcaccagccgatcgactacctgtggaccaagatccgcgcggtaaaagacatctacggcgagatggtcggcaccatcgatacgccggagaaatacgaagcgcacaagctggcgatggcacagtcggtctggaagacgctgaaagagaacgactcggccacctgccgctcctgccacagctacgacgccatggacatcactgcccagcgccctgaggcgcgcctgcagcacccggtggcgatcaaacagggcgaaacctgcatcgattgccacaagggcgtggcgcatatcctgccggacatgagcggcgaaacccaggccggcgccgccgagctggcgaaggccgcggcgctgaccgcaccggacgccaccaccctttacaccatcgccaccgaaccgttcttcctcggcgcagacgacagtcataacgccggcaacctgatgccgtccaccgaagtgcaggtggtcaagcaggatggcgacaaggtgctggccaccgtgagcggctggcagcaggacggcgtcagcgaagtgttctacgccgcacagggcaagcgcatcctcagcgtgctgctgggtgaagacgcgcgccaacagctgaagaccgcgtcgactcagaccgatgcggaaaccggcctgatctggcatcaggtctctctgcaggtgtggctgccgcgcaagcagctgatcgacgatcagcaaaaaatctggcgctacgccgcggacatgatgtcggccaactgcaccggctgccacgggctgaccgcgctcgatcgcttcaacgccaaccaatggatcggcgtcatcaaaggcatggcgccacgcacctcgctgacgcaggaacagctgcgcgtgctgacgcaatacgtacaaaaacacgccagcgacatgccacctgccgcaccggccaagctttaagggagaagcgcaatgagcaaccaacaaccgttaaccatgagccgccgccgcttcctgaccggcgccgccgcgctggccgccgccccgctgctggcgggcttatggcccaaagcggcgctggcgcaggccatcagcgaagcgctgccgcagttcatcgtcttgcgtcaggcgcaaaaaggcattctgaccggcgcccactggggcgcgtttgaggccatcgtgcaggacggcaagatggtcggcgtgcagccggtgcaggacgatccgtatcccaatgagctgatcaccatggcgccttatcaggtgcacgccgagaaccgcatcaaatatccgatggtgcgcaaaagctggctggaaggcggccccggcagccgcaccgaactgcgcggccgcgacgagtgggtgcgcgtcagttgggacaaagcgaccgagctggtgtgcaatgagatcgttcgcctgcagaaagatcacgggccgcagtcgatctacgccggttcttatggctggaaaagcgtcggcatgctgcacaacagccgcacgctgctgcagcgtctgatgaacctgaccggcggcttcctcggctacgccggcgactactccaccggcgcagcgcaggtgatcatgtcgcacgtggtcggctcgatggaggtctacgaacagcagaccgcctggccgaacgtgatcgagaacagcgagctggtgatcctgtggggctgcaacccgatggtcacgctgaaaaacagctggaacgtgccggatcacgtcggccagaccggcttcgaggcgctgaagaagaaaggcacccgggtgatcagcatcgatccggtgcacaacgacagcgccaagttcgtcaatgcgcagtggatcgccccgcgcccttataccgacggcgcgatgctgatcggcatcgcccacacgttgctgaccgagaagctgcataacccggacttcctgaaaacctacaccgtcggcttcgacaagttccaggcctacctgctgggcgagagcgacggcgtggcgaaaaccgccgaatgggcggccgacatcagcggtgtcgatgccgatacgctgcgcggactggcgcgcgagatggcgaagcatcgcaccatgatcatgggcggctggggcattcagcgccagcaccacggcgagcagcagcactggctgctggtgacggtggcggcgatgctcggccagatcggcctgccgggcggcggcttcggcttcagctatcactattcctccggcggcagcccgaccgccaagggcggcatcatcgccggcatctccgccggcaacgcgccgaagaactccccggcgccgatcccggtggcgcgcatcgccgaatgcctgagcaacccgggcaaaaccatcgacttcaacggtgccaaggtcacttaccccgaggtgaaaatggtgtatgtggcgggcggtaacaccttccaccagcatcaggacaccaataacctggtcaaagcctggcagcggccggacaccatcgtggtcaacgagccttactggaccgccaccgccaagcatgccgatatcgtgctgccggccaccaccagctacgagcgcaacgatctggaaatgggcggcgactattcgcagctctacgtgttcccgatgcatcaatgcgtgccgccgcagcacgagtcgcgtagcgacttcgacatcttctcggcgatggcggccaggctgggcgtgcaggaagccttcaccgaaggcaaggatgaaacccagtggctgaaaggcatgtacgacgacatgaagaaccaggcgcgcgccgcgcgggtggcgctgccgccgttcgacatgttctggcaatccaacaactacgtgcgcttcccggtgccagaggccaataagcagtgggtgcgcttcgccgactatcgcgacaacccgctgctgaacccgctgggcacgccgtcgggcaagatcgagatctactccgacgccatcgccaaaatgcattacgaggattgccccggcattccgacctggatgccgccgcacgagtggtatcgcgggccggaagcggccaaatatccgctgtcgctcaataccgcgcacccgaccaaccggctgcactcccagctcgataacacgccgctgcgcgagaaatacgcggtagcggatcgtgaagcgatcctgatccacccgcaggacgcgcagccgcgcggcatcagcggcggcgatctggtgcgggcgtttaacgatcgcggtcagatcctggtgggcgcggtggtcagcgaagacgtgcggcccggcgtggtgcgcatcagcgaaggcgcctggttcgatccggccgatccggcgcagcccggctcgctgtgcaagaacggcaacgtcaactgcctgaccttcgacatcggctcttccagcctggcgcagggcaactgcgggcagatggcgcagctgcagatcgagaagtatcgggggccggtattgaaaaataccgcgcacgcggtgccgcaaggcgcctgatcccgcggtaaacagagggcgcaacgcgtaatgccggtcagttaagcctgaccggcatttttttatccagtctcagtacgcgccgtgcaaaaggaatagccttaaatatccggtatttctctgcgaccgctatgaacggcatctggagagacagccactacgccggtcccccacaccattcggggcggctgcgatggcggcaggcgcgacgctgtgtctgtggcggttgaaagacgcttaaggcgcggtgtccgcttccagtctggcgaggtagatcagcgcctgatcgcggtgatcgtggcacatgtcgcggctcggctgcaggctgccgcacaccttcggccgcagcggcgaatgaaacaggccgcagcgcagccgttcatccagatgaatgcagcgggtattggcgggcttgccgttcggcatgccggggatcgggctggatattgacggcgcgatacagcaggcgccgcagtcgctgcgacagtccatcagcgctactcctggtgggctggggggaaagaagcgcgacaatagcagccgcacgcggccaccgccagcagaatccctgcgtccccgcgatctttacactcatcgctctgcgccggccggctgcacccgatggcgaataaacgcccagcaaaccttgatttaaagaaaaaaacgcgtgaaacgtgcaattccttcgctttacatgcgccatgcgcccatgtactattgagctagtacaaaagaacttcttccctcaggagcacacatgtctacggacaccatccagaagctggcccgcccttccgtcctcggcggcgcgatgatcattgccggaaccgccgttggcgccggcatgttttccattccgatcgtcacttccggtgtctggttcagcggctccgtcgcgctgctggtgtatacctgggcctgcatgctgctgtccggcctgatgatcctcgaagccacgctgcactacccgagcggcgccagcttcaacaccatggtcaaggatctgctgggcaaaggctggaacgccgtgaacggcctgtcggtggcgttcgtgctgtacatcctgacctacgcctatatctccgccggcggctcgatcatcgcgcacacgctggagggcatcgtcggcgtcggccagactaccgccggcctggtgtttgcgctggcggtggcgtttatcgtctggctctccacccgcgcggtcgatcgcctgagcaccattctgatcggcggtatggtgatcaccttcgtgatgtcggtgggcgacatgttcacccacgtgcagcctgcggtgctgttcaataccggcgatgaccaggccagctatctgccttacgccctggcggcgctgccttacctgctgacctcgttcggctaccacggcaacattcccgggctggtgaagtactaccacaaggacagcggctccgtggtgcgcagcctggtgtacggcaccctgttggcattggctatctacatcctgtggcagtatgtgattcagggcaatatcgcgcgcgacgccttcaagcaggtgatcgccgagggcggcaatatcggcagcctgctcaagcaaatgggcaacgtctccagcagccagaccgtcagccaactgctgaacgccttctcctatatggcgctggccagctcgttcctcggcgtgtcgctgggcctgttcgattatctggcggacttctgcaagttcaaggacgacgccgtcgggcgcagcaagaccgcgctggtgaccttcgtgccgccgaccctggccgcgctgctgttcccgaacggtttcctgtacgccatcggcttcgccgggctggcggccaccgtctgggcggtgatcgtgccggcgctgatggcgcgcgccagccgccgccgttatccgcaggccggttaccgtgcaccgggcggcaacggcgtgatcctgttcgtcatcctgtttggactgatcaacgccgccgcgcatattctgtcgctgttcggcctgctgccggtcttccagtaatccccgacgggagggctgccgccctccctttcccgcactgtttttgcgccgggctattgcctgaaatcggcggcgcgagtaccttgtcgcaacttctctaatactcttcattgcggatgaattgaaatggcaagagctaacgaaattaaacgcggcatggcgatcagctacaacggcaagctgctgctggtaaaagatatcgacgtgcagagcccgagcgcccgcggcgccagcaccctgtacaaaatgcgcttctccgacgtgcgcaccggcctgaaagtggaagaacgcttcaagggcgacgatatcctggacaccatttccctgtcgcgccgcaaggtgaacttctcctatatcgacggcgaagaatacgtgttcatggatgacgaagactacaccccgtacattttcaagaaagaccagatcgaagacgagctgctgttcattccggaaggcggcctgccgggtatgcaggtgctgacgctggatggtcaggtgctggcgctggagctgccgcagaccgtggatatggaaatcgtcgagaccgcgccgggcatcaaaggcgcttccgccagcgcccgcaacaaaccggccaccatggcgaccggcctggtgatccacgtgccggaatacctcagcgccggcgacaaaattcgcattcatatcgccgaacgccgctacatgagccgcgcagactagtcgcgcctacggggccgatactcggccccgtttcattttccgctacggcaattccgggaaaaagcgccgcttgagcgccagctcgacgccgcgcagctccgccagccctttcaaccgcccgatggccgaatagcccggattggttttctttttcaaatcgtccagcatctgatgcccatgatcggggcgcatcgggatcggccgccgatcgcccgcccgctgccgacgcagttcttcggtcagaatcgcttcgatcaccgccaccatgtccacatcgccctgcagatgcgccccctcgtggaagcttttcgggttttcttcgcggcaggtggcgcgtaagtgggtaaagtgaatgcgatcgccgaaggtttcaatcatccgcaccagatcgttgtcggcgcgcacgccgtaggaaccggtgcacatggtgaagccgttatgaatgctgtcgacagtctgcttcagccactgcatgtcttcgatcgtggagacgatgcgcggcaggccgaggatcggccgcggcggatcgtcgggatgcaccgccagccggatgccggcctcttccgccaccggcacgatggcacgcagaaagaccgccatgttttcgcgcagttgcgccttgtcgatgccgtcgtattccgccaggcggcgacggaactgctccagcgtgtagccttcttccgcacccggcagcccggcgatgatgttgccggtcagcgtggctttctcctcctcgctcatggcggcgaaataggtcgccgcctgactgcgctcttgcgccgtatagtccgcctcggcgccggcgcgctgcaggatgtgcagctcgaacgcggcgaaggctacctgatcgaaacgcagcgctttggaaccgtccggcagcggataggccagatcggtgcgcgtccagtcgaggatcggcatgaagttgtagcaaacggtgtcgatgccgcaggccgccagattgcgcagtgactgctggtaattggcgatgtaccgccgccagtcgccgctgtgggttttgatctcctcatgtaccggcacgctctccaccaccgaccacaccagccccttttccgccagcagcgcctgccgcgcgcggatctcgtcgatcggccagacttcgccgttcgcaatatggtgcagcgccgtgaccaccccggtcgccccggcctgacgcacgtcatccaaagagaccggatcgttcgggccataccaacgccatgtttgttccatgttgtgtccttatgcctgtctcgcatcgcgatgttgttataccagtttaatttagatgtcagctagctttaacttactctttcgccgtgcgctgtcaaaattgaaccgttcattggttgatccgcttcacgattctggcttattttggcctgaccaattcccttaacctgccgacaactttagactggtggcagttttttatcgtcagcgcgcccttgttgatggggcgacaaactggtccgctaacttgacgcaagtggcccgccagctgtctactcgctttggagatgagatgaatacgatcgccaacaccccgctgccgggcgccgtccggcaaccgaattatgatcgccgggccctgcgcagccgcatcgtgcacctgggtttcggcgcgttccaccgcgcgcatcaggcgctgctgaccgatcgggtgctgaacgcccacggcggcgactggggcatttgcgagatcagtctttccggcggcgtgccgctgtttgaggcgctgcggcaacaggatcatctgtacagcgtgctggagaaaggcgcggacggccatcaggccatcgtgatcggcgcggtgcatgagagcctgcaccgcaaactggagggcatcgccgcggtgctggagaagctggccgaaccgcaggtggcgatcgtctcgatgaccatcaccgaaaaaggctactgtatcgagcccggcagcggacggctggaccgacagcattcggggatcgtcgccgatctggcgtggccgcatcagccgcagaccgcgcccggcattttggtggaagcgctgcggctgcggcgcgaacgcggcctgcccgccttctccctgctctcctgcgacaatattccggagaacggccacgtgttgcgccgggcggtgctcgatctggcgcaggcgcgggatccgtcgctcgccgactggatcgccaccgccgccaccttcccctgcaccatggtggatcgcatcgtgccggccgccacgccggccacgctggatgagatcgccgccgcgctgggcggcgtgcgcgacgaatgcgccatcgcctgcgagcccttcattcaatgggtcgtggaagacaacttcaccgccggacgcccggcgtgggagttggccggcgcccagttggtcagcgatgtgctgccgtttgaacacatgaagctgcgcatgctgaacggcagccactcgttcctggcttacttaggctacctgggcggctaccgctatatcaacgagtgcatggcggatgagcactaccgccgcgccgccctgcggttgatgctggacgaacaggcgccaacgctgagcgtcaccggcatcagcctgcccgattatgccgcacagcttatcgcgcgcttcagcaatccggcgctgcaacacctcacctggcagatcgccatggacggcacgcagaagctgccgcagcggctgctggatgccgtgcgctggcatctgcggcacggcggcgactatagcgggctggcgctgggcgtggcgggctggatgcgttacgtcggcggcgtcgatgacgccgatgagccgatcgacattcgcgatccgctggcagacctgctgcagcagacgatcgccgcaacgcaggacgatcgacggcgcgtagcggcgctgttggcgttgaaatcggtattcggcgaaacgctggcggcgcatgcggcgtttagcgaagcggtgacgcaagcctatttatcgctgcgcgatcgcggcgcgcgtgaaacggtgaaggagtgggtaatgcggtgaggagcctgcagggccgagaataaccatgccggcgtaacgttacgccggcatggcggaacgacttaacgataaacgaccgtcataacagcgagtttcttctgttggtctacccacttcatttcggttgtgcctagatttagcggaagttctttgcgtgtagtatcaaaacctgacaacgcttgctgggcctgataatgctggccgttgcggtaacattgcgtattcgccttagaatctgcaatcttgaccgtgcaaggactttcaacgatagagccgacgaagcgaattaccccgccggccactcctgcctgactcactgccgtccatgaaaacaacattcctacgatcaaaaataaccgaaaggtattcatggcaacctcatttttagttaagccaatttaaccatagaggatcttgttaggaataatcgcaaggaaagggacgagatttgatcgttaatctcgtcattaacaatgtaaaaacaagctactaacaaaagttaaccgcatctaatacagggttttatctaagaattttcttgttataaacggtggattttgtcggttgaaaagcgcatggtgacgtgcaaaatttgcgagatagagcacaaattaaatcgcggccgtttcaccgacacggctgcgtaactcatttattaagcaggttaatttttgcgccaggaattattaatgaccaaaaccaatttgattaccggtttcctcggcagcggcaaaaccaccactatccgccatttgctggctcataagcccgaacatgaacgctgggcggtattggtcaatgaattcggcgagatcggcatcgacggcgcgctgctggcagacagcggcgcggtgctcaaagagatccccggtggctgcatgtgctgcgtcaacggcctgccgatgcaggtgggcttgaatatgctgttgcagcaggccaaaccggatcggctgctgatcgagccgaccgggctcgggcatccgaaacaaatcctgtcgctgctgacccaggagagctatgccggctggatcgatctgcaggccaccctgtgcctgctggatgcccgccagctcagccagccgcgctaccgcgacaacgaaaacttccgcgatcagctggccgcggccgacattattttggccagcaaaagcgatacctaccggccggaagacaggctggcgctggaggcctggaaggcgcaagacccgctgcagcggccctgctacgccatcgcgcaaggcgaagcggatgtcgcgctgttgtcacttcctcgcacaaatcgtacagaattgccggacgcgcagcatcatcatggtcaggcgaaaaagcaggggctggcggcgctgcggctgccggagcacgcccgctggcggcgagcgttgaatgaagggcaaggcttcaccagctgcggctggatttttgacggcgatacccggttcgacaccgtcggcttcatggaatgggtgcgactcgcgccggtcgaacgcgccaaaggcgtggtacgcatccccgaaggcacattgctgatcaatcgtcaggggcaggatctcaacatcgaaacccgcccggtcgcgccgctcgacagccgaattgagcttatccacagcgaaaatgccgactggaacgccctgcaatccgccttgtttaagattcgtttaagttagaccccgtaccgttgccccccggttgccgcagggctgccgggttttatttcgttttcatttttccaacaggttatgtcatgacacgccgcaatttacccctcattctcttcttcaacttactgggcgttgcgctgtttctgtcctggttcctgccggccaatcacggcggctggtttaccctggattcggcgattttcttcttctttaaccgccatctggccaccgacccggcgtttttacacctggtcgccatcaccaacaaccgcgcgttcgatgtgatttcgctgctcgccatggggctgctgtatctgtacttttatctgaagcaggacgccgccggccgccgccgtctggtgatcaccggcgtggtgatgctgctgaccgccgtggtgctgaaccagcttggccacctgctgccggtgaaacatccaagccccaccctgacctttgacaatatccatcgcgtcagcgagctgaccggcatccccaccaaggacgcttccggcgacagcttccccggcgaccacggcatgatgctgattattttttcctgctttatgctgcgctatttcggccgcggcgccttcgccgtcgccctgctgattacgttggtcttctcattgccgcgcgtgatgattggtgcccactggtttaccgatatcgccgtcggctcattgtccgtggtgctggttggcgccagctgggtgctgatgacgccttgcagcgactggatcgtcgatcggttgaatcgcctgttgcccggtaagcaccgccccggccaaccataatttgtgtctatgactcatgccgggaggcttacgcctcccgccctcttcccctcgccgcgcgcaaaaatttccccaccgttcgttaacgcttttgcaacctgatttcacgccagattcatacatcggacaattggcgttttttatatgaagatttacattatgttacatcacaaattcatataaaaaagacgggaaaaaggctcgcaatcccctattggttccggtaatctcagatgcgtttgtgcctggtttaagtcgaatcagtatgaaatccgataaaaatgtgcgttctcgcacgttttcaacggtaactggttgtcgatgcaacaggtgcggactaggctcgtttcgtttggcatttttcaggtagcgactttcgtcgttaaggacttcaagggaaaacaacaacaatggtcaaatctcaaccgtttctgagatattttttgcgggtagtccctgcaattgccgctgcggttatgctgtcagcgtgcagctcgactcacacttcgaacttgaataacgcacaaactgagatgcgtgcagttaatgacaaagacggtcttttactgcaagcctctcaggatgaattcgaagcgatggttcgcaacgttgacgtcaagtcaaagattatggatcagtatgcggattggaaaggcgttcgctaccgcttaggcggtgacaccaagcgcggcatcgattgctcggcgtttgtacagcgcaccttccgcgaacagttcggcatggatttaccgcgttcgacctatgaacaggaagatctcggcaagaaaattcagcgcaccaagctgcgcgccggcgatttggtgctgttccgcgccggttctaccgggcgccatgtcggcatctatttaggcaacgatcagttcgttcacgcctccaccagcagtggggtcatgatttccaagctgaccgataactattggaataaacgttatcgagaagcgcgccgggtgctgaccaacggttaacggcgcaacgccctgaagatcctgaataccaaacgagcgataagcgccgcccacgggcggcgttttttttggttgtcgaacaggtatcatcaaaattgatccctgccttatcgtcacttttccctgcttaacgccgccgcacgccattattttgataaactgttggcaggaaatcgccccgtcgaggaaaaactcgcctattatcgtcagatgacggcaacggcgcccggcgttatttaaaacgtttccgctgatattatgcgcatgatatttctgtcggcgacgccgcatatttaaatggcgccgccggttggtacgggataaaaaggcaaaaatgaaaaaaaagccgttggcacaatccattaactggctgcgcgacacgcctgacgcccggttgcagaggactcggttatgggcttgaaaagagctttcgcccgcagcgtgtctcaccgacaacgcagcctggctaaaagcggtgtcgccgccctggtattttttacgctattcaccgcggtcacgctttctttgatcaaccaccagcgcacgcaatatcaacataaggtcgaagcgcgcacgcaaaagttcacgctgggttatatctcgcatctgacggcggtgatgcggcaaatgatgccgctgctggacaagccttgcctctccagccagtcggatattacctaccaggcggcctttaccagcggcgtgcgcaccttcctgttggtgaaggacggctacgcctattgctcctccgccacgggcgacatgatgttgccgatgaaaaatatctatcaggatatcgactgggatctgcctttggatctcaagctgcagcagggtacgccgatggtgccaaataaaccggcggttgcggtttggctgcgacatcccggcgaaaaggccactggcatcctcgctacgctggacatcgatctgatgccctacctgctgttcacctcgcacgacgaacaggcgccgggcatcgccatcgtgatgggcaaccgcgcgctgaccactttcagcccgaacctgatgccggtcaatcagctaccgaagggcaaggcggataccctgacgctgcccaatctgccgctgaccatcctgttctacaacgagaaactgacccccaacgacattcgcctgacgctgctgggcagcctggtgctgtcattgatgaccggcgtactctgctactacatgctgctgctgcggcaaagcccggaacgcgcgctgctgcgcggcatcaagcgcaacgagttctttatcgaataccagccggtgttccataccgatagcaacagcataggcgggctggaagcgctgatccgctggcagcatccgatcgagggccgcatcccgcccgatgtctttatcccctacgccgaaagcaacgggctgatcgtgccgcttacccgccacctgttcaggctgatcgccgaagatgcgccacagctcgccaaagcgctgccacggggaggtaaagtcggcctcaacatttcccccgcccaccttagcgcaccgtcgtttcaccaggacgtgtatgaactgttgacgcagctgccgggcgattactttacgctggtgtttgaaatcaccgaacgcggcatggtggaagaagagagcgcgctgacggagtttgactggctgcacaaacagggcatcgagatcgcggtggatgattttggcaccgggcacagcgcgcttatttatcttgagcgcttcaccatggattatctgaagattgaccgtggcttcgtcaacaccatcggccaggatacggtcaccgcgccggtgctggatgcggtgatctcgctggcgaaaaagctgaaaatgctgacggtggccgaaggcgtggaaaccgccgagcagatgcagtttctgcaagaacacggcgtcaacttcatgcaggggtactacttcagcaagccgctgagcatcgatgatttcgtcgcttactgcaatgctaatcaggtctttgattatcaggaaaaaaatagttaatctttaagcatctttaccctgcgcccgtccgaagaatgttatgctgggcgcaggttgtactttattccacagcaggagcttactgtctgatgtccgtgcgcattttcgctgctctggtgctctcggcactgagcttcggtctgcgggccgaagccctcaacgaaagctacgctttcgcccttctcggtgaaccgaaatacgccaccgacttcagccattttgactacgtcaatccggcggcgcccaagggcggcgacgtgcgactggcggccatcggcacctacgacaacttcaaccgcttcgctacccgcggcgtgcccggcgagcgcacgatggagctgtacgatacgctgttcaccaactccgacgacgaacccggcagctattacccgctgattgccgaatcggcccgtttcccggccgacatgcgctggatggaattggatatcaacgcccgcgcgcgcttccaggacggcagcccgatcaccgccgccgacgtggcctttaccttcaataaattcatgaccgaaggcgtgccacagtttcgctcctattacaaaggcgtcacggtcaaggccatttcccggttgacggtgcgcatcgagctgcctaaggcgaaccgtgagcaaatcctcagcctgctcagcctgcgcgtattgccggaaagcttctggaaaaaccataagctcaacgaaccgctcagcaccccgccgctcgccagcggtccgtataaaatcggcgattatcgcctcggccagtacatcacctatcagcgggtgcgcgactactgggccgccaatctgccggtaaaccgcggccgctacaacttcgacagcattcgctacgattattatctggacgataaggtatcgctggaagccttcaaggccggcgcctacgatttccgcatcgagccgtcgcccaagagctgggccacccaatatcagggcggcaacttcgcgcgcaactacatcatcaagcaggacgagaccaaccaggcggcgcagaatacccgctggctggcgttcaatctgcaaaaaccgctgttcgccgatcgtcgggtacgggaagcgatcggcctggctttcgattttaactggatgaacaaggcgctgtattacaacgcctatcagcgcgccgacagctatttccaaaacaccgcctacgccgcccgcggctacccggacgccgctgaactggccttgctggcaccgctcaagggccagataccgccggaggtatttaccagtatctaccaaccgcccgcctccgacggtagcggcaacgatcgacaaaacttgctgaaggcgacccaactgctgaaagaagccggttgggtggtcaaaaatcaaaagctggtcaacgccaaaaccggccagccgttcacctttgaactgatgctgctgagcggcagcaacttccagtacgtgctgccgttccgccacaacctgcagcggttgggcatcgagatgcaaatccgcgagattgacgcctcgcagtacacccgccgcatgcgcgagcgcgatttcgacatgatgtcgacggtgtatatggcgatgccgttccccagcgccgatctgcaaattctgtgggattcgcagtacatcgattccagctataacacccccggcgtcaaagatccggcggtcgacagcctggtcaggcaaatcgccgcccatcagggcgacgaaaacgccctgttgccgctcggccgcgcgctggaccgggtgctgacctggaacaactacatgctgccgatgtggtactccagccacgatcgctacgcctattgggacaagttctccacgccgtcggtccgcccggcctatgcgatcggcttcgacaactggtggtacgacgtcaacaaggcggcgcgcttaccggctcagcggcaataaggagtcggaatggcggcctatctgatacgcagactgttactggtgatccccacgctgtgggcgatcatcaccatcaacttttttatcgtgcaaatcgcccccggcggtccggtcgatcaggccatcgccgccattgagctggggcacggcagcgggtttggcaacggcggtgtcggcgaaggcctgggccacgcccggacgggcatcgcggctggcgacggccaatatcgcggttcgcgcggcctggatccggaggtgatcgccgagatcactaagcgttacggcttcgacaaaccgctgcacgagcgctacttcaccatgctgtggaactatatgcgcttcgacttcggcgacagcctgtttcgcggcgcttcggtgatgcagctgatcggccagagcctgccggtctccatcacactgggcctctggagcacgctgatcatctatctggtgtcgatcccgctcggcatccgcaaggccgtccacaacggcagcgcgttcgatacctggagcagcacgctgattatcatcggctacgccattccggcttttctgttcgccattctgatgatcgtgctgttcgccggcggcagctacctggactggttcccgctgcgcggcctggtatcgagcaacttcgacaccctctcatggccggcgaagatcgccgactacctgtggcacatcaccctgccggtgctggcgacggtgatcggcggtttcgccaccctgaccatgctgaccaagaactcattcctcgacgagatccgcaaacagtacgtcaccaccgcccgcgccaaggggctggacgagaaaaaaatcctctaccgccacgtgttccgcaacgccatgctgctggtgatcgccggttttccggccacctttatcagcatgttcttcaccggctcgctgctgattgaagtgatgttctcgctcaacggcctggggctgctgggctacgacgccacgctgcagcgcgactacccggtgatgttcggcacgctgtatatcttcaccctgatcggcctgctgttgaatatcctcagcgatatcacctacaccctggtcgatccgcgcattgacttcgaggcccgccaatgagccgccttagcccgatcaaccaggcgcgctgggcgcgttttcgccgcaaccgccgcggctactggtcgctgtggatctttttggtgctgttcaccctgagcctggccgccgatctgatcgccaacgacaaaccgctgttggtgcgttatgaaggccggttgtacctgccgtttatgattagctacagcgaaaccgccttcggcggcgaactgaataccgaagccgactatcaggatccgttcgtgcagcggcagatcgaacggcacggctgggcggtctgggcaccgatccgcttcagttacgacaccatcaacttcgccaccgaggtgcccttcccttcgccgccttcgcggcacaacctgctgggcaccgacagcaacggcggcgacgtgctggcccgggtgctgtacggttttcgcatttcgatgttgttcggtctggcgctgacgctgttttccagcctgatcggcgtgtgcgtcggcgcgacgcaggggtattacggcgggcgtttcgatctgtgggggcagcgctttatcgaagtgtggtcgggcatgccgacgctgtttctgatcattctgctgtcgagcatcgtccagcccaatttctggtggctgctcggcatcaccatcctgttcggctggatgagcctggtgggcgtggtgcgcgccgaattcctgcgcacccgcaattttgactatatccgcgccgcgcgcgccatgggcgtgccggatcgggtaatcatgtcccgccatatgctgcccaacgccatggtggcgacgctgaccttcctgccgtttatcctctgcggctcgatcaccaccctgacgtcgctcgatttcctcggtttcggtctgccgataggctcgccgtcgctcggcgaattgctgctgcaaggcaaaaacaatctgcaggcgccgtggctcggcatcaccgccttcctggtattggcagtgctgctgtcgttattaatctttatcggcgaagcggtgcgcgacgcctttgaccccagcaaggcgcattgatatggccactcctttgctcgctattcaggatctcagcatcgccttccgtcagggcgacaccgtcacgccggtggtcaacgaactctcgctgcaaatagcgccggcggaaacgctggcgctggtaggggaatccggctccggcaaaagcgtcaccgccctgtcgatactgcgtctgctgcccgcgccgccggtggtttaccctgccggcgatattctgttcaacggcgagtcgttgctgcatgcgccggagactgacctgcgcaaggtgcgcggcaatcagatcgcgatgatctttcaggaaccgatggtgtcgcttaacccactgcacaccatcgagaaacagctggcggaagtgctgatgctgcaccgcggcctgcagcgcgaagccgcgcgcgcagagatcgtcgaatgcctggagcgcgtcggcatccgtcaggccaaaaaacggctgcaggactatccgcaccagctgtccggcggcgaacgccagcgggtaatgatcgccatggcggtgttgacccgcccgaaactgctgatcgccgacgaacccaccaccgcgctcgacgtgactatccaggcgcagatcctgacgctgctgcaagaattgaagcaggagatgggcatggggttgctgttcatcacccataatctgaatatcgtgcgccgcctggcagacaacgtggcggtgatgcgccaggggcgctgcatagagcaaaacggccgcgcgcagctgttcagccggccgcagcatccctacacgcagcagctgctggccgccgaagacgtcggcgaaccgctgccgctacccaccgcgcgccccggcgacgagcggccgctgctcaaggtggaagatctgcaggtgcgcttccctatccggcgcggcctgctgcgccgcacggtggattatcactatgcattgaaatcattgagtttcgagctgcgcgccggggaaagcgtggggctggtgggagaatccggctcgggtaaaagcaccaccgggcttgcgttgttgcgtctgctggcctcgcagcagggcgccatctggttcgacggcgaaccactgcacccgctcacgatgaagcagatgctgccctaccgcagccgaatgcaaatcgtcttccaggatccttattccgccctgaatccgcgcctgaacgtgcagcagatcatcgccgaggggctggaagtgcaccagcggcttagcgccgagcagcgggaacaacgcgtgatcgaggtgttgcgggaagttggcctggatccgcagcttcgccaccgctatcccaccgagttttccggcggccagcgccagcgtatcgccatcgcgcgcgcgctgatcctgcaaccgcagctgttgatcctcgacgagccaacctcttcactggataaatcggtgcaggcgcagatcctgacgctgctgaaatcgctgcagcaacgccaccggttggcttatctgttcatcagccatgacctgcaggtggtgcgttcgctatgtcaccaggtcatcgtactgcgacagggggaagtggttgaacagggagactgccgggcgattttcgcggcgcccgcagccgactatacccgtcaactgctgcagttggcggattagcggcgaattcagaaggggtattgcgcgctgagtggttcggcgatcgcggcaccgacgtttttcaggcggcacatggtggcgctctcgtcgctgcgctgcacgaacaggcaaggttccccttcccattcgacgatcgcacagtcgacctgaatctcctgcagcgacagattgagctgttgcatgacctgccaggcctcggccccttcatggctgagcagcttcagcccaatcaggttgttatcttcgtctattccgttaaacggaatcggttcgaccttcacgccggtgaaaccggatagccaacgataactttgcggcaagcgatgcactaccgaaagttggatactctccacatgaaatccctagtttgaaaaggtgaaacacttttacctgacagggttactaagttatagccgttgactcccgactctgccgcgcacaaatgttatttaaatgtaaattttgccgcaagccattaacctgaccccgtgcttgccgatgccgtgccactttttggcgcgccgtgcggtgttatttcacggcattttgcgactcagctcgcatttttgcgttatatgtaaccctttcccgcagcgatctcaactcttttttcttgcaatgcgactactttttcgtcgccatatttttacaatgaagaaacatcttacccgtcacgttagcgccgccaccgctgctaataccttgatttacatcaatcctaatacaaaccccccgcgcggctcagccgacagcgcgccgcgcctcccggggaatattgggcggcacgacggcggaattttttaacaaaaagcacacaggtgagaaagtggccagttgattagcttgcgtatatttagcaacaaatttttcattgccggttgcaccctgaaatggcagggcgcaaccccgtgacgatgcggagcgacacgccccgaatcgggagaacgtcaggctgcgcgatcgcgcggccggctggcgtaaacatagaacagcaccgccacgatgctgcacagcgccatcgaggtgaccattggccaagcgcttttgcccggcgccatcgacagcaccgcccccaccagcgcaccgatgctgaagcgcaacgtgccggccagggaagaagcggtgcccgccatatgcggaaaatcatccaggatcaccgccatggcgttggaggagatcatcgcgatgcaccccagatagaccgcaacgccgatcaccagcgcccagaagcccaggcccacggtgctcaccgccattagccacagccccatcgccagctgtaccagcagccccagcttgaacatcttgaccgcgccgaaacgccgcacgttgcggctgttgatcagcgtcgtcaggaacaggaagacgatgttcagcgcaaaatagtaaccgaaatgctgcggcgaaacgtggttcagttcgatgtagacgaacggcccggcgctgaggaacgagaacatgcccgcaaacgagaaggcgctggccaacatgtaactcagcacccgcttatggcggaacagcgaaccgaagttgcccagcgtggtgcgcaggtggaaccgctggcgccgctctttcggcagcgtctccttgatgaacaaggccaccagcagcgaaccgatcagcgccgcggcgcccatggtccagaagatggcgtgccagctgaaccacagcagcagcgcaccgccgatcatcggcgccagcagcggcgcaatggtcatcaccagaatgacgaacgacatcatgcgcgagaactcatccttggtgaacatatcgcgcatcagggcgttgatcaccacgctggcggccgccgccgccaaaccgtgcaggaaacgcagcccgatcagttgatcgatcgactgcgccatggcacaggcgcagccggcgatggcgaagatcagcgttccccacaggatcaccggcttgcggccgatgctgtccgacatcggcccatagaacagctgcccgaaggcaaagccgagcatataggcgctgagcgtcatctgcacgctgccggactcgacgccaaactgagcagcgatcaccggcatactgggcaggtacatgtcgatggccaacggcatcagcatggacaacaggcccagaataaaaatcaaaccgagatgagaggttcggttctgttgcacgttccacgactccttaatcggccgcaatcaatgatcggttatcagtcctgcaggtgcggcgcgcccacgctggcgatctcttcttctgtcaatgggcggtattcgcccggagccagatcgtcatccagcacgatggctccgatgcgctcgcggtgcaacgcgatcacccggttgccgacggcggcgaacatccgcttcacctggtggtagcgcccttcgctgatggtcaagcgcaccacgtgctcgtcgacctgctccaacgtcgccggccgcgtcagatctttctcgttgtgcagttgcaccccttcagcgaaacgctgcgcggtgtcttccgccaacgggtgctccaacgtgaccaaataggttttctcgcagtggtggcgcggcgacgtgacacggtgcgaccattgaccgtcgtctgtcatcagcaccagcccggtggtgtcgatatccaaccgcccggcggcgtgcagcttgtacgcgaccggctcatcgaggaaatacagcaccgtcggatgatcgggatcgtcggtagagcagacgtagccctgcggtttgttgagcatgaaatagcgcgggccgttctgctgctgcagcggattgccgtcgaacgccacttcttgctccggggtcagtttgacagccccgctcttcactacctcaccgtccacggtgacgcgtttagcccgaagttcgcgcgcgaccagcgcacggctgatgcctaactgctgagataaaaacttgtccaatcgcatgggatctgctttgcctgtcgttgttatgatcgcattgatcgtattgccaaaatatgacgcccgccgttgcaccgggtgcaaatagcaggttcagggggggaatcgcgtgggggaacagcgattgctgtcacacaagtatagcgacacaacgcgttgcccgacagaggtaattttcacgcttctcgcaccgcgcgtgcgcagaaggcataatagtagaaatttttcggccgcccggggcgtaaaatgtcgctgtttctgtgggaacgggggcgacaagacctgtacccggcggcccattccactctacggcgttcattttatggcctttaccctacgcccctaccaactggaagcggtcgaagccaccatcaaccatttccggcggcgtcccgaaccggcgctgatcgtgctgccgaccggcgccggcaaaagcctggtgatcgccgaactggcgaagcgagcccgtgggcgggtgctggtgttggcgcacgtcaaggaactggtggcgcaaaaccacgccaaatactgcgcctacggcctggaggcggacatcttcgccgccggtctgcaacaaaaagagagcgccggcaaagtggtgttcggcagcgtgcagtcggtggcgcgcaacctgccgctgttcgacggcgccttttcgctgctgatcgtcgatgaatgccaccgcatcagtgacgacgacgacagccagtaccaacaaatcatccagcatttgcagaaaaccaacccgcagctgcggctgctggggttgaccgccacgccctatcgtctgggcaagggctggatttaccagtatcactaccacggttttacccgcggcgacggcgccagcctgtttcgcgactgcatctatgagctgccgctgcgctatatgattaagaacggcttcctggtgccgcctgagcggctggacatgccgattgtacagtacgatttcagccggctggaggccagaagcaacggcctgttcagcgaagcggatctgaaccgcgagctgaagcggcaaaaccgtgtcacgccgcacattatcagccagattgtggagtacgccgacgatcgcaaaggggtaatgatcttcgccgccaccgtcgagcacgcccgcgagatccacggcctgctgccgcacggcgaggccgcgctggtcagcgcagaaacgccgcccgccgagcgcgatgcgctgatcgaggcgttcaaacagcagcagttgcgctatctggtcaacgtagcggtattgaccaccggtttcgacgcgccgcacgtcgatctgatcgcgatcctgcgcccgaccgagtccgtcagcctgtatcagcagatcgtcggccgcgggctgcggctggcgcccggcaaggaggattgtctgatcctcgactatgccggcaacccgcacgatctgtttacgcctgaggtcggcgtcagcaagccgcacggcgacagccagccggtgcaggtgttctgcccggcctgcggcttcgccaatctgttctggggcaagtgcaccgagaacggcgatatcatcgagcactacggccgccgctgtcagggctggctggaagacgacgacggccaccgcgaacagtgcgattaccgcttccggttcaagagctgcccgcactgcggcgcggagaacgacatcgccgcacgccgctgccatcagtgtcaggaggtgctggtcgatcccgatgacatgctgaaggcggcgctgaagctgaaagacgcgctggtgctgcgctgcggcggcatggaactgcagagcggccgcgatgacaagggcgaatggctgaaggccacctattacgacgaggacggcaccagcaccagcgagcgcttccgcctgcagacgccggcgcagcgcaaagcgttcgagatgctgttcctgcgcccgcaccagcgcgcgccgggcgtgccgttcgcctggcacaccgccgccgacgtgctggcgcaacagcaggcgctgcgccatccggatttcgtggtggcgcgcaaacgcggccagttttggcaggtgcgcgagaaagtgttcgattatcaaggccgtttccgccgcgccaatcaattgacctgagcgaacggtccccaatctggacaggttttcgttgccctgcaggcggctttccgttaaaatgccgcgcgctttacctgggcctgcccagcgttaaagcggattcccgaacttgctacttgggtcgcctgtagcagggtaaattttcttttaagagaaaaaacaatgttcactatcaatgcagaagtacgtaaagaccagggtaaaggtgcgagccgccgcctgcgtgcagcaaacaaattcccagctatcgtttacggtggcaaagaagctgcagtttccatcgaattggaccatgattctgttaagaacatggaagctaaaccagaattctacagcgaagcagtaactctggttatcgacggtaaagaaaccaaagttaaggttcaggctgtacagcgtcacccgttcaagccaaaactggctcacatcgacttcgttcgcgtttaatcgctacgttttcgaacctttcgggacgccgaaataaagaacgccgcaattgcggcgttttttattgtctgcgatccggcgcgcttacttgccgctgccggtccggcgctgcagctgatcgcgcaggttcggcggcgtgcctctgatggtcagcgtgtcggtggccgcatcccagaaaatgcgctcgcccaacagcatggcgtcgaaattcaggctgatgccgccgccgctgccggcaaatttggtcagctggcgcagcgtgccgcgatccgccgggaagctttcctccaactcatacccttgctcgctggagaactgcatgaagtctttctcaccgaccggcgacagctcctgcgacagggcctgcagttcaatctcttcgcccgcctgcagctgttcgttgcagtagctgtacacctgttggcgcaccgactggcgctcgttcttgtccaactgcgcatcggcgcagtagtcgtccaccgcctgcagcagcccgcggttttgcgccttggtgtccaacccttcggacgccgccaggaaatccatgaagaagtcggcgaccttgcggcctacgcgcccgcgcaggaaggtcagatagcgggtcgattccgggttggtttcccattcggtcagatcgatgcgcgcgacgatatcggcgttgttgatgtccagatagtgcgtggtgttgatatccagctcttcgttgacgcgcatgctgttacggctgttcagcaccgcgatcagcaagtactccaccgccagataacggtattggccgaacagcaccacgccgccttcggcaaacggatacttcgccagttcgtcgcgcaggcggccggtcgccgcgcggctgaaggccagaaagtccttatcgtccttgcggcaagtgcgcagcgcttccgccagttcgctgccttcgttgaacaggcccaaggccttgctcttggcgctgtagacgcgatgcagttccgtcatcatttcttccaccgccgcgttggtgggaagcaaggtatcacgcaacaccacgtccagcgtttgctcgtcgcgtttcaccaattggtgcagagcgatctggtcgatatccagactcatgataaatcctcctgttctttaggcgcgtattcaaacactgaagaccccgccctgcaatactaaaaagctgtggccaaccggaaaggcgcagcggggccccgccccggcgcgggcgaacaatttcccgaatgacaggaagtgataaaagagcggaaaatcactgccctatacggtaagatagggcactttgcagattactaagcgcaattttatgccacaatcatcccgttacagtgacgaacacgttgaacaactgctctcagagctggtcaatgttctggaaaaacaccatacccccaccgatctttccctgatggtgctgggcaacatggtcactaatttgatcaacaccagcgttgcccccgcgcagcggaaaaccctggcgagatcgttcgcggaagccttgcaggcttctgtccgtgaagataaagcacattaatattgacttatggtgacaaaccgtcagcgttatcgtgaaaaagtctcccagatgatcagctgggggcactggttcgccttattcaacatcctgctcgcccttgggctgggcagccgctacctgtttgtcaccgactggcccgcatccctgctgggccgggtctatgcctttgtcagcctgctggggcatttcagctttatcgtgttcgccggctatttgctggtgatcttcccgctcaccttcgtggtgatgtcgcagcggctgctgcgatttatttccgccgcgttggccaccatcgggctcacgctgttgctggtcgacagcgaagtgttctcccatttccacctgcacctcaatccggtggtgtgggatctggtggtcaacccggatcaaagcgagctttcgcgcgactggcagctgatgtttatctgcgtgccggtgatcttcctggtggagatgctgttcggcacctggagctggcagaagctgcgcagcctgaaccgccgccgcttcggcaagccgctggcggcgctgtttatcagcgcctttttcgcgtcgcacctgatttatatctgggccgacgccaacttctatcgcccgatcaccatgcagcgagccaacctgccgctctcgtacccgatgaccgcgcgcaagttcctcgagaaacacggcctgctcgaccagcaagagtatgagcgccgtctggtgcaacagggcaacccggaagcggtgtcggtagagtatccgctcagcgatctcagctacggcgataaaggcagcgactataacctgctgatgatcgtagtggacggcattcgcgccaaagacgtggcgcaggacatgccaaccctgacccgcttcgcccaggaaaacgtgcgtttcagcgatcactacagttcgggcaaccatgccgataccgggctgttcggcctgttctacggcatttccccgacctatctggacagcgtgctcgccggccgtaagccgtcggcactgatcaatgcgctcggcgatcggggctaccagctggggctgttctcctccgatggcttcaatgccagcctgtaccgccaggctctgttgaccgacttctcgctgccaacgccggcgccgcaaagcgacgcccagaccacccagcaatggcaacgttggttggcggaccagggtagcaaagagccgtggttctcctatatcaacttcagcggcgccgagccgaccgaaggcgacaaaaaaccggttcctgccgactttattcggcgctaccgcaccggcgcgcaagatgtggatgcccagataggccaggtgctggacacgctgaaacagcgcggcctgctggataaaaccgtggtggtgatcaccgccgagcacggcgtcgagttcaacgacagcggcaaaggccaatggggcgccggcaccgccttcaaccaggcgcaactgcaggtgccgttggtgatccactggccgggcaccccggcgcagaccatcagcaagctgaccggccataacgacgtcatgcgcaccttgatgcaacgcctgctgcacgtgcaaaccgcgccgaaagactattcgcaaggcgaggatctgttcaccgcccagcgccgcaacaactggatcgccaccggcgatggcaaccagctggtgatcaccacgccgacacaaacgctgatgctggacaacagcggcaactatcgcgtctacgatcagaacggcgatgaaataaaagacgagaaaccgcagcttgctctgctgttgcaggtgttgaccgatgtaaaacgctttatcgccaactaactgcttaaaactaaagcaatcaagtggcgaggcgcttgcattaacatcgggaatcggtagtatgatttttcatagcgtcggcatgtagcgcagcctggtagcgcaccgtcatggggtgtcgggggtcggaggttcgaatcctctcatgccgaccaaattcaagaaaacctgctgttacagcaggttttttttcgtctgcacgtcgagaggatgagaatctccgcaggaggtttgagccgagcgcagacagggtgcgaagcccctccgtagcataatgagtgcgaattcccttttgttaattttaagcctccctttaaggcggttgcctaacttaattcattcattttggcacgcgcgccgaagcaaatgataaatatgagtacaatgcctaccagctgcggccaaattgcgccacaaaggaagtcgtcccctatatgcttgctgagatcgaggcatgtgtaagtcgtagccccagagaaccaagcttttatccaaaaagttttcttcatgggatgtccctattccaaaacattttaatatgtcacataacagagtaagcagtcattaatataaacattgattcgattgtggaaaagagctaattataaagagccttacgaaggcttacatagtatcaatcaaataatcaaaaggagttgtttatgaaagttattgattcttcaatgctaaatttcgtttctggcgcagggaattttgcggataaccgtagcagtaacggcaaggtcaacaataataatgggggctgtagtgcttcaactaactatggtggccaggctaatggttttgttagcaactcttcagccggcatgagcagggattgtgctatagcactaggattggcagcggcaggtggcgttatcggcggacttatatcgcaaggcgccagggctgttattggtggtgtagtgggatcttcgattggctcccttggagcatgcattggtggaagcaacaacaatggttctcaaaacgcctctaaaggcggaggttataacgggggcacctgctcctggtaattacacacgaaatactaacagtgcttataaaaagcttgcatggtgttttttgaaaggaggaaaggaaatgaagaatccatttgttgtttttgcttttgtttttataatgatttcattatcgcaaagtgtttttcacactctgggaataacaagttacaacgggattttaaatatcagcttacctaaagatttcgctctgagcattgtaattatttctgttccaatagggatttttgcaatcatgtatgggatctattcatctgttaaatggtttgctaaaacgtggaataaatctggagggtaacagattactccctatgcgatagcggaggataaaacctcccctatcgctggtttattattttttaatccaacctaatcactctatctgccgacgctatcgtagtttcacggtgcgcaatgatgatccgcgtaatttttagttttttgatcgcctgattcaccttcgcttcactgtccttgtccagcgcactggtcgcctcatccaggaacaaaatcgccggtttcttgtaaatggctcgggcaataaacaggcgttgcttctgcccgccggacaacccttcccccagttcgccgatcagggtttcgtaccccatcggcatgcgcatgatcacctcatgcagatagctggcgcgggcacaggtttccatccaggcatcatccatctcgtccgcgaacccgcagatattttcccggatcgagccggagaacagcttgtcgtcctgcatcacgcaggcgatcatcttgtggtagttgttgatgccgagctgccgaatatcgacgccgttcacctcgaccttccctgaatccgggggaaacagcccgcacagcaccttcatcagcgtggtcttgcctgccccggatgggcccacgatggccacgctttctcccggtgcaacgttgatatccaaggcatcaaagaccgccggtgactggctgtcgtatcggtagctcagggcatgggtggataaccccattggttgcattttcgagatatatgggagctcgggcttgcgatcttcccgtggatgcagggcgatatcggcaatgcgttcgttgtgcaggctcatcatgcgcaactgcagcaaaaattccgtcagcgaccctatgcggtcggagaactggccccgaaaggcgccgaacgccacgaacataccgagggtcatctgattatcgatcaccagacgggtccccagccacagtatgacgacctggtcacaggccgccacgaaggtgttgatcccgccaaacagcatgtccattttggtgatccggataccggtattgatggtgtcgatttcaagattgagccagtgggcgatacgacgctccgccatgccctgcatcttgacggtggcgataccgtacagcgtctccataaaataggaaccggcgcgggcatttctcaccagcgcttcttcggacagctggcgataatacccgtaggtcaacaggcgcatcagcacatagagcgcggtgaacgcgatcaccacccaggtcaaccagcccccatacagcaccatcatcaccagcacgccaatcaccataatgccgtccatgatggcgccgacaatactggtggtgaaggtgctgcgcagcgtatccagtgagccgaagcgcgactgaatgtcacccagcttacgccgttcaaagtagccgagcggcaggcgcagcaggtgggtaaacaggccggattgccactgcacgttgatgagcgtcgacatgaccagcccggcccaggcgcgcaccatgccaatggcggcccgcagcaggatgaacagcattagcccaacgcagatgagcgtcagcaacccgcgatccccggcgggaatagcgtgatccatcaccagctgcgtgccgatgggcatcaccaggttgatggtttcgaacaccagagacaggcaaaagattttgccaagcgcccccttgagaccatgtacgctgccaatcagcgtacgcaggtgaatgcggtggcgaacactatcggcggtaaaggcgctgccgggccaggcctcaagtgctacgccggtgaaactgtgcgacagctccgccaggctgaccgcccgccgcccgcgcgccggatcgtgcagcaccgcgtggtgacctttgacgctaaccagcaccacgaaatggttgaactcccagtgcagaatgcagggcagtttcagcgcgccaagttcgtccagatccagcgacaaggggcgggtgctcaaccccagctattcggcgataccgatcagcccaaccagcgttgcaccgcgggttgacagattgaactgccggcgcagcgcgatcaggtcgatgtttttgccgtaataaccgcagatcatcgccaaacaggccagcccacattccgacgactcggtctggtgcaccatcggaacccggtggcgcagccgcagatccagctggctgacccgttgtttgaatgttggcttattcattgaccggccccgttgcgctgtgtttcatgtcgtagaacggcgacaacatccattgataaaccggccttttctccagaaacagagtgctttgcgctttcatgccgttttccaggctcagacgcttaccgtcataggcaatggcctgtttttccggaatgacgatcaccttgtagtaaggcacagcggcggtcagcgccgctttgggcgccccctgataggtcagcatttcctgcggtgaggccggggctttggaaatgacggataccgtaccggcaaactggccgaacttctccgccggaaaggcgtcataacgcatattgacccgatcaccggcagcaatgtaagggatggcgtcgttaggtacccacagcaccagagcatagcgatcgatgtcgtgggggagtacctgcagcagactgtcgccgacgttcaccatcttgccaaccgtgacgctcagcgaatcgatgcggccgccggccagcgcgcgaacgataatatcgccagtggcatcgatgttttgccgctccttttgcagctcgtagcgctgcagctccatctggtagatctggttgtcaaattcagcggcctgggtctggatctggctttccagcgcggtgatctgcagcgcattctgttcgttctggccggaaagccccagcaggttgttctgctgctggtaatacagcgcgacctggttggtgagctgatccttgttgatcagccccttggtctgatagtgccgatagttctccatgttctccttcatgatgcgtatcccttcctgggcacgctggaggatatcggtggagcgggtaaatgcggcggtatattgcgccttctgtttttccaacatagtcagcgtggcctgcttgctgctttccagccggctgatgatttgcgcaatgcgcgccagctgggcatcgatatcccgctgctggttatcgctgaccactccgctgcgggtgcttttgctgacgtcaatctggtaaatggccgccccggcggcgatccgttgcccttcggtgacaaattgtttgatcactaccccttgaaccgtggagtaaacgttcgcggcacggggataggtgctgatctcaccggtcacgttgacccgccgggtataggtaccggcgatcacgaaggtgagaaaagcaatgagaaaaaacaggcacagccccgcggtgaaccaaacgggaataccgggcaacagcaatgcccggccgcgccatttcaatttctggttaccgatcgcttcctggcgaaacaccgtttttcttccttaaagaaaataaggggcgttggcttttgccctattatgtcgttaacaattcgctaaatatcaggcttgctgttaatcagcgctcgatacatagttgaatgtgatatcgcaaataacctcgtcagtttactgagcgaatcttgcccgtttttatgcgcaggggctaactgtttttattttttccagatatttcttgctccccatcaaattgtctcggcgtcaaaattcctgttaccgtgccttcatggggatgcagttgcatccagtaaaactcaatccctgcaaaggcttactcctattttttgagggcaaagccaaatagcaaaccatggcaccggagaactaaagtctcatcgaaagagttaattcattgaacacctttatacttaaccaaataatacttcgcgatagttattcatcattaatttaaacttgacccgtccaataaaaagcgttaatcataaaaagccttacaaaggtttgtgcaagataaacttagaaatcaaaaggagttgcttatgaaagttattgatttttcaatgctgaattatattgttggtggccgcggcaataatggcggtgaccgtgttgacaatggtggcagaactagcaacgggaaaagtgggggaagtaacaatagcaacagtaactattactcaaaacaaggtgatgccataaccaattgtaataacggcattatcggtgggatgattgcaggatcgctcggaggagtaccgggtctcgctgttgggcttgtcggcggcgcaatagctggcggttgcttcaataatcaaggttccaatggggggcagagtagcaatgcaggcagtaaaaacaattgcaacaactcaataggcggttcttgtaaggtttgactttaccttcaagagcataacattacaatatcagacaggactaaaacggtgacaaggattatcagttcattaattgtctttttatccatcctggccggttctttttttctgagtggcgccggggtaataggttaccaaccgtggttttctgcacccgagaatttgtcaaaacttgtgattatcgttgtcacctactgctcctttgtttacgccgcattaagtatttatagaaaacttaaaaaataaaccccataaaaaaaatccataacacaggcatgacgttcagttttgggttaaagaatagaattaactataaattaaccctcaataattcagtttttcgtctgccgtttacgcggaaagtttgacgatcgccgccggaataccctgacgcaccgccgcaccggtcacccaatccagccaggtattcggcacttcgcgcgtcggatcggcaaaccccagatcgttgaggttgatgccggcggcgatgcgctcatccatcgccagcggttcgccatccaggtagtgctggctggcccccatctcccggtggccgtagccgtgttcccccgcgatcacgccgggcatcccccccgccagcaaactgatctgcgcctcgcggctgccgcccggcgtgctgatgcgcacccaatcaccgtgttgaataccgaaacgcgccccgtccgccgggttcaaggccaccaggttcaccggcttcacgtcgtgcaggcgccggatcaccgcggtggagctgctcatcacattcgatttgaaggacatcaggcgcagcggccactgccgttctgggtagagcgcttccaccgcgcggccgtccgacaaacgcgccgggtagcaggtggggcagccgctgaaacgctcgccggtgatcgcatgccggtgcttcgccacttccgcattccagatctgcagcggtttctcccagcggttgcccacgctgccgtcgcggcggccgctgtcgtgatcggcgaagcggccgccgcggctgtagataaacgccacgcggtcgatctcatcggcgcgcagcgtctgcgccagctgcggcagcaagcgatcgacaccgctcagcgccagttcgtccgccctcgcggccggcaccggcgccttgccggcaaacgccacgttggcggcggcgcgcagataataatcctccgcacggttgagcggcagcagcccgccctggccgtcgccgatagcgcgatcgccgaaccccggcaatgccaggcgtttggcgatggcaatgcaaaacgcctccatggaaatcggctgcccttgcgccgtttgcgcagtcgccggcgtcactatcggccagcgcgcggtggtggtcttactggcgacgccgccccagggggcgctgaatccccaactctcaaaattatgggtgtccgggacgatatagtcggccagcgccgtcgtttcgttgataaacgcatcgatagcgataaacagcggcaaacgcgccggatctttcagccgctcctccgccacgccgcgcaacccggcgataccgtacaaggggttggtcatgttcgagatccaggctttcagcccgtacgggtaccctgccagcgccgaggtcagcagctcggtcaactgcccggcgacgaacggataccagggcgctttggccggccagggcgaaatgcccgccgctactttttcgcggtattcgtcggaggtttcataggcggccttgctgcgcgcgatattcagccctttcggttttaccaggccaggaaactcgaccaggttatagcgcggcccctcggcgaagccgttgaatttaccgccgccgacgaacacgccccccgccaggctcaggttgccgatcagcacgttaagcatcatcaccgcccaggtattgtaaaacccgttcgccgccatcatcccgccatgggcgatcactgccgccttgcgcccgtgggcggtaaaggcctcggccagtgccgcgatgcgtgccaccggcacaccgcattgccggctgtacgcctccggcgacagcttgtcggcggcctctttcaaacactggaagccgcttttcacctccacctgcgcgccatcgtacagcgtcaccgtacgggttacccacagctcggcgctgtcgcacgtctcggccgccaccagctcacccgcgccgttgaccaccagcggtgacgccgacccggtgccgttgagatcggccagcgtcaggtgctgccccgcgcgcggatgctcgctctcggcgatcaccagatgcgtggcattggtccagctcttctcgccggcgcgttgcatggcggcctcagacgggatggcgagataatcggtctgataacgccggtggtcgaggatccaacggatcatcgccatcgccagcgccgagtcggtacccggcaatatcgggacccaatggccatgatcgtccgccaacgtggtggtcagcggcagcgccggcgccaccaccgcataacggaattcgctgcgcaatctggcgctggccaattgccgggcctggcgcttgaacgggttgccggactgcgccggtgaggtccccataaacagcgcgaattcgacctgttcccagtccggtttcacgtgcgggttcttgtccagatcgttcatcaacgcgccggaaccggcacggtaggccagcccgcagtaagcgccgtgcgcgccgaagtttttgctgccgaaactgttctgggcgaagcgccgcaggaagctatcgcgcccgtcgtcaccggcgttggtcaccaatagctggttggctttcggccccagccccggccgtcgggcatcgatcggcgtctccagatcgcggatcgcccgcagaccgtccacatgcccctcgccgaacagattgccgccctccaccacttcggcgatcaactgctcaaagctgatgcgctgccacttgccctcgccgcgtttgccgacgcgcttcatcggctccagcacgcgcatcgggctgtaaagcccctccagcagcgtggcgccgcgtgcgcaggcggtggaacgggcatcgaggccgcgttcgccacccaactgcgccaacgcatcctgcagcggcaacgcagagtcgacgtgccgttcctgagacagcggatgataagggttgccagcaatgcgcaatacccggtcggtctgcctgtccacccgtacccgcacgccgcattgcgtccagcagccgaaacactgggtcatcgagatggcctgttgcggattgccttgccattccggcattgcccgcccttcgggcgacagggagttgccgttgatgcgatccagagtcacccgccctgaggtgccgtgaatcaagccgtcgatcgcccgtttggcgacttcgcgatagctcaggccgaaagcggacaatccgccgaaggccaggcccactttcaaccactgacgccgggtgagtttagccatgttgttttctccgcagtaaaaacgcctgtgcttcacgcaccatgatcattaacgccagccacaagccgaaggtgccgacgatcgccagcaaaccgtcagtgccgagcggcaggctataagaggagttagacgcgctgtatttcgggatggtttgtacctcgatcaacagcgtccagcgcatcagccagctcagcaccagagcaccggccaccagcagcggcgcaccggcgcgcggcaagcgccgatagccggcccaggcggcgcacgccagcgtcagcccccacagcgcaatccatcctgcggcatactggcgcgccatcgcctgcgtctgcagccagtggcgtaccgccgcgccggataacgtatcgccgcatacccacagcaggatcgccccgccgagcagcagcagtgtcagcaacatcccgcgcgccagcggcgcctgctgaccgggccgttcgcgcatcgccagcagcagcaaagccaagagcgcctgcagcgcgctgaggaacatcacgatcggaaacccgtagctgaaccagattgggcgggcgcgcacgatggaaacctctcgcccggtgtacaacagcaggccgatagccaccagcgcgcaggcgggcgctatcccacgcaacagcgcaaccggtctgcccgtcagccgcgtaaattcaatcgcgataaaccacaggccgatcagcagggtaaacagcggcaagaacagcgcgccccacggcatccacgaccagggcgtcgggtaggcgtagaaatgccagaaacgggcggtttgatgcaggtcggcggtcaacgccagcggcgcggtaatggcgcacgtcagcccgataaacagcgccatgcgctccagatgcgcggcgttatctccaccgcgccagcgccacacgcaggccagcagcgcggcgcaggcggcgatgccgataaagaagaaatattgtacggcccacggcagccagctcaccgcctgcggctggctcagcacttctgcgatcatcagttggcggctcatcgtctttctccccataaggcgacctgcgcccgccccggcagcggcgtgacgaaggcgtcatccagccccagatagaacacgtggggcgcggtttggttctccggcttgaggacttttatctcgacctcgtggcgccgcagcagcttgctcagcgtgctgtgcggatcgcgcatatcgccgatgatccgcgcccctcccacgcacgactccacgcatgccggcaacaatcccgcctccagccggtgcacgcaaaaggtgcatttgtccgccgtttgggttgtgtgattgataaaacgggcatcgtacggacaggcctgtacgcaataggcgcaacccacgcagcgtttgttgtcgaccaccacgatcccgtcctcgcgctggaaggtggcctgtaccggacataccggcacgcagggcgggttgtcgcagtgattgcacagcctgggcaacagcacgttggtcgcagcggcttcgccttcgaggctgacctgatactggtttaccgtggtacgaaactccccgtgcggcgtctggttttcaatggcgcagctcacggtacaagcctggcaccctacgcagcgccgcaggtcgatcagcatcgcgtaacggcggctcgcatccccctcgcgccgcgtcggtgctaacgtcagcccggcctccgccacggagatcagcgaagcccccgccgtcaacacgcccagccgctgtaaaaactgccgtttaccgaaatccatgcgcctctcccacgtcctgggcatcaccccgatcacgctattgatgcccgttagatgaataaacaatgtcgatgatttacagtgtaaaaatgacattgggctcagctctattgtggttaaccacataccggacctaacgttgatctaaaacaagtgacggcaggcagattgcccatcaggaggggccgtgagggtcgtgttattactgctgctcagtctcggctgggggatggcggcacaggcgggcgagtggtcgatcggcgtgctggcgatgcgcggcgatgcggcgaccgcgcgtgactggcagccgctgatcgacaggctcaacggcagcgtcggcggtgagcgcttccgcctgcagccgctcgatctggcgcagatgcgcgaagcggtcaatcggggcagcgtgcagttcgtggtcactaatccggcgcagttcgtgcagttgaacagccactatcatctgcgctggctggcgtcgttgcgcgccgccaacggcgatcgggcaacgggcaacatcatcggcagcgtgattttggtgcggcgcgacagcggcataacgacgccgcaggcgctgatgggcaaaacggtgggcgccatcgctccgcaggccttcggcggctatctgaccggctataaggcgctcagcgatgccggtatgcggcccgagcgcgattttcacctgcgctttaccgggttccctgccgacgccctgctctatctgttgcgcgagcgcgccattcaggccgctatcgttcccgtctgtctgctggagaaaatgggtcgggaaggcttgatcaacccggcggattttcgcccgctgttgcaacggcccacatcggttccctgcgtcaccagcacgccgctttatcccaactggtcgttcgccgccctgcccggtctggataactcactggtggatgcagtagcaagagccttgctgaccgcaccgccgcagtctccctttcagtggggcgcaccggcctcgaccagcgcagtggaagcgctgctgcgcgccgtcaatcagcacccggaacagcggcgcctgtggctggatatcaagagctggctgatccagcatcagacggccgtcagcctgtcgctggcggtgctggcgctgttgatcgtcaaccatatctggatcgcgctgctggtgcgccggcgtgggcgacagctgctccatgccggagaacaactgcgccgtcaggagcaggcgctggagaacgccaggcagttgaacgtgctgggagagatggcctccggctttgcgcatgagctcaaccagccgctggcagccattcgccactatgcgcaagggtgcctgatccaactgcgcaaaacggacgccgggcacccgctgctgacgccgctggaaaatattgatcggcaggcgcagcgcggcggcgagacgattcataacctgcgccagtgggtgcagccccccaccgagaaggtagacaaggcgagctggcgccccatctcgataaacgaaaccgccgagcgggtgtgggcactgctgcgcctgacgcaacgctaccccgacctgaaactgttcaacaacgtgtcaccttcgctgacgctaaccctgccgccggcgctgctggaacagctgctggcgaacctgctgctgaacgcggcgcaggccggcgccaacgccgtctggctttccgccgacgaacacgaacgggcgctcgatgtgcgtttgcaggacaacgcgggcgggatgagcgcggccgggctggagcaggctttccgccccttcaacaccaccaaggccggcggcatggggctggggttggccatttgccgccgcctggcccggtatggcggcggcgagatccaactggctaaccgccccgcccccgacagccgcaatgggctatgcgtcaccctgcatttcatatttaacgatgaggaaaaccatgccgctaattcatctggtggatgatgacgtcgccgtcaccgacgcctgccattttttactgaccagcctcggccacgacgtgcaatgctggaatgacagcaccgactttttggcgcaggccgatctgtttcagaccgggatcgtcttgctggacatgcggatgccgaaactcgatgggcaccaggcctacgctgaactgcgccgcctcggcagcacgctggcggtggtgttcctgtccggccatggcgacgtgccgatggcggtggagcagatgaagtacggcgcggtggacttcctgcaaaaaccgatcgccgctgaaccgctgatcgccgccctcgaacgggcgcggcaggtctcggccaaagcctggcgacgccatgaaacttgtggccgctaccgcacgctcacgccgaaagaacgcgacatcgcgcagctggtggtgcgaggcatgatgaacagggaaatggcggagcggttgaatatcgccctgcgcaccgtagaggttcaccgggcgaaagtgatggagaaaatgcaagccgccagcctggcggaattagtggttcagttgcaggggttaccgcacgccgcgcaagaatgatcgcatcatgcaaaattccgcgccccctcttgccaaccggccttcctcaggccagaatactgtacattaattcagtatttacaggtgagtcatgtttgtagaattggtgtacgacaaacgcaacgtcgctgggctgcccaacgccgccgagattattcgcaacgagctggaaaaacgcgtgcatgcgctgttcccggaagctgacgtgcgcgtgaaaccgatgcaggccaacggcctgaactccgacgccagtaaaagcgatcgtgagaagctgaaccgaatgttggaagagatgttcgaagaagcggatcagtggctggtcactgatatataaacccaacctgatggctgggctcctcaaccggctattttaccgccagaatacagcaaacgctcagcccttgattaatgggcttgacgcggtgcctcccccatccggttatcggttggttagtgtgcacttttccagcgcatatataccataacaaaaagccccagcatcgctgctggggcctctgtcatggtgccggctaccggaatcgaactggtgacctactgattacaagtcagttgctctacctactgagctaagccggctgaatttggcggaaggacagagattcgaactctgggagctgttacactcgacggttttcaagaccgttgccttaaaccactcggccatccttccaatgggcgctgatattagcgataccgttatgaaatgtctatcattttgatgcaaaaaaatggcatgggcggtgcagttgcctaaacttcaggccttaaacgcttaaaaaatgaaaagccccgcaaaagcgaggcttttatgttcggctgaaacgcgattacttcggctgcgaatcgtagtcggaacaggtttgatagcccttgttcatgacatggcccgtgtcgttgtagctgacaaagtacgtttgcactttgccatcgcgcggcgcgacagcataggtatcgcaagtgccttgcgcatgaatcagcgtggcagacgtcgacggcggaccggcaatcgcccgcacctgctgcttggtcatccctactttgacatcgctgaccaccggctcattgacataactggttgcacggtcataggcggtgcagccggcaagaatggaaaataccgctgcagtaccgacggccaaaaccaacttcttcgtcatagcttgtcctcttggagtacgtttgttgtcccctaagtctagaagtggaaaggcttttctacaaattcccgtttgtcgatcggtgcggtttacgctcgtcgatcagcgtttgacgttttcctgtcgtttcagctgctcttcaaacccctgctgtgactcctgcacgtaacgctgcagccctgcgggatcgataaatgcctgcgtatcgccggcctgcaaacgccgccatttgtcggctaaagcgaaacgcgtccctttattggcgataaatatatccgcctgcacccgtgccaaacgggcgaaactgccgcgaatgtcctcaatcagctgcggatagtttttgttgccgatcaggtagtaatccggtgtagccaggctgtcagcatagataaagcgatacggcttgccgttatgccgtagcgtggtcaaccacgacgtcgcgcccggcagatgccccggcgtcatcatcgcggtcagcgtcaggccgccaagggtgatgctgtcgccatcggcaaccacaatatccgtttgcacggccgggaaagtgagcgtatcccccaacgcgaaatcctgccgtccacctaacgccaactggcgcgcattggccgcgctggccaccagcctcgcgccgctccagcgtttcagctgcgcaatgccgccggcctgatcgagccttgcatggctgttcaggatatatttcagatccttaatgctgaaccccagccgttcgatattcgctttgatgcccggcgcactgctctccaaccccgcatcgatcaaaatcaatccctgcggcgtgctcaacaataccgacgacaggttgctcgtgccgacgtaatacacctgctcaaagatctggaacggcgctatcggctgcgcccactcttcaaacagcgagtatggcggagcgctagacaacggctgcgccgggtctaacttcgcctgcgtggagaagctcaaggaaaaggccatcgccatcagataatgcatgctttttttcatttttctcttctgtctgtgtcaaccgggcaggagtatactcggccttatattgaacagtattcaattaaaaaaaggacaattgatgaatattctacaaatggacatgaatctgctgaaagtgctgtatctgctgatggtaacgggttccagccgtaaaaccgccgagcggctgggcatcagcacctccgccgtcagtcatgcgctggctcgcctgcgggaagtgttggatgacccgctgtttcgccgagaaggccatcgccaggttcccaccctgtttgcactgtcgttgaaagacaaattggcgccgctgttctcctcgctggacagtgaaatgttcggccaacaaccgcaggcgccgcgtcgcttcacgctggtggcgccccccgctctgcaccctattctgttgcctttgctggcggaaaagggcgccgcttgccatgccgatattcactgccaaaactttgaacgacgcgcctggcgcgaagagctgcttgaggggagcgtcgatctggtgctggcggtgggcgatcatcaacaacgcaccagcgcactgcattatgaagcgcttgggcgcactcgcctgattgcgctgtatggcccgccgctatacccagtcctgcaagataaacgcgcgctggccttcagcgaactggcggattacgcgcattattattgccatccgtggccacaaacggaaaacgagctggatcggcagcttgagcgccaggggttgcaccgccgcattgccctgaactgcgccgactacgcacaacttccaccggtgctgcgccgcgcgccgttgctggcggtagtgcctcaaccatggtttaccgcccagcccgacaagcacgggttaagcgcgctgccgattagcgataacctggctatcggtcaccttttttctcaataccgaaaaggcgagccggagtggcgaaagcggctgatttccgccatccacgccgagctgcgacactactaccgctaagtaggatcagaaaccgaaatcgctcagcgccgggacatcgtccgggcgccgaccgagcggccaatgaaaacgccgatcctgttcgcgaatcggcatgtcgttgatgcaggcatggcggttaatcatcaatccatcctgattaaactcccagttttcattgccaaagctgcgataccagttgccggaatcatcgcgccactcataggcgaaacgcaccgcgatgcgcgcgccgtcaaacgcccacagttccttaatcagccgatactccagctctttcgcccacttgcgttgcaaaaatgcgaccaccgccgcgcggccgtcgacaaactctgcgcgattacgccaatgggtatcgagagaatagacctgtgacacccgctcaggatcgcggctgttccaggcatcctccgccaaccgcactttttcgctggccgattcacgggtgaaaggcggcaaagggggtttaatgctcatgatcatctcctgcgtaataatgtagacaactctgtctacattattacgctagcgcatgtagacagagttgtctacaatcactcgaaaatagcctgggagaaaatgatgaccgccgatcgcaataccttacccgcccgccagcgcatcctgttgacggcccacgatctgttttatcaggaagggatccgcgccaccggcatcgatcgcatcatcaaggaatcaggcgtcactaaggtgacgttttatcgccactttcccagcaagaacgatttgattacggcgtttttggcctatcgccaccagcagtggctcacctggttcagcacagcactggatcgccatgtggcacaaaccggcgggttgctgccggcgctggcgccctgcctggcggaatggttcgacgatccgcgctttcgcggctgcgcgtttatcaatacggcggtggaaatcgccgatctgctgccggaaagcctgcaaatcgccggccggcataaacggcaaatggcggatgaactggcgcgtcacctgcccgccggcccacagcgggaacagcgggcggcaatgctggcgatgctgatcgacggcgccatcgtcagagtgcagatagagcggcaaccgcaggccgcgctgcaggtgctgaatgccgcgttggacatgttggcgcaaggcgggttcgatcagtaattggcccaaatgcccggcgtcaccagttccaacagatgggcgtcgggatcgcgaaaataaatgctctccccgccgtgttcccagcgcatccgcccctcaatctccacgccgttggccaccagatgccgttcccagtgcggcaactgctctttcgccaccgccagcccgatatgcgccggccccacgccatcgtgcgcaggaataaacccggtcgggtagtgcgccccgcgcagcgaatcaccttcgataaacaacaacagtacgctccgatcgccgacgttgtaggcgcgaaaccgttcgttggcgaccatcgtcggcagcttcagcacctcctggtaaaacgcgtccgcgcgttcaatatcgctgacgtacagcaccgtttctatcaccctgtcgatcttgagttccataatagcctccgctctgttttccgttctgacagcgtaggtcgaacggaggcgagccaaagcgcttcccgagccgacaacggatcaatccgtgctttttaccagcaaaaaaaacgcggcccgaaggccgcgctgtgtgattcacacgctggtgcttagaactggtaaaccaggcccacggcaaccacgttgtcggtgttgatgccggcagcgtcggtgaagtcgttgttgtccatcaggttgattttgtaatcaacataggtagacatgtttttgttgaagaagtaggtcgcacccaggtcgacgaatttgaccaggtcttgatcgccgtagtccttgccgttgccggcgcggcccaggtctttacctttggtctggttatagccgacgaacggacgcagaccgaagtcgaactggtagtgcgcataggcttcgaagctctgcgccttgttggcgtagccgtaagcaccatcatccttggcagagctgccgaaacgcgccgcgttgtaggactgggtgaacatcaccgccaggtagacgtcgttggcgtcatatttcagaccgccggagtagccttccgccttatcgccgcggcccatgatgttctggtgaccgttaccgccgttctgctcgctggtgcggcgagagttgaagaaggcgcccgcggcgctgatgccgtagcccatgtcatagctcatggacatgccgtagccttcgccgttttggcccagaacgtcacgaccattgttggtctcttcgccgttgccgtttttaccctggtactgcagggcgaagttcaggccgtcaaccagaccgaagaaatcattgttacggtaggtcgccaggccgctggaacgctggaacatgaactggtcggcgccgtaggtcataccgtcgaactcaggctgcaagtcggtatacgccgcgacgtcgtacagcacgccggtgttacggccgtagtcgaaggagccgtagtcgccgaatttcagaccggcgaagccgtaacgggtgaagttcttgttgtcctggctttcagcgtggttcaggttcgcctgatattcccactggccgtaaccggtcagctgatcgctgatttgcgtttcgccgcgcaggccaaaacgcatataagactgatcgccgtccacgccgttgttgctggagaaatagtgaagcccgtttactttaccgtacaaatccagtttattaccgtctttgttgtagatttccgccgcgcctgctgtgcctgcaaccagcagtgcgggtaccatcagagagagtactcgaagtttcatcgttattatcctcgttaattatgtcgagctacggccactgcccttttcgagcattattagcacgactgtgcattaccattctggtaacaagggttatattaatccagaaagaaaatgataccaagtatccgatagtgtttcattgtaattaataaaggtttcaaaatgtaaatacgcgcgaactttcacaaaacattacagacaaacaaaataaagcacttaaagataaaaaatagactaactgataaaaaatcatgtagttatacatatctttaagaaaaaaaagccaaccatacaattgagcgagacaataagcacattgtgccaaaacgcgaaccacgcgcagccgctataatcacctcgctatcatcattattttcattattaccttcattatccgaagataatttctgcattcctttaaccggcttctggccggttttttattttcctccctactctcctcacaatttcagcccgtacaaatagcacgcaaataaataacccaatgatatagtttcattaatttactttcgcactaattgctaatctttttccttattttagcctacaaattgaacttgcttttcatttcgtgctttatctcatcgattatttcccgccgcaggcacaattagccgcagagattcagttctggtaatctgaaaaaagcgcaccttcagcgagtaaaattcatgatgccctttcaacccgacgtgctgtggcggcggctgcaaagttcccccttccgcgctcgcttccgtttaaatgccaaggaccagacttatctcgagggtaagggattgccgctgatcctcagccatgcccgcgattttatcgaccgccgcctggccgccgcccatcctaaaaacgacggcaagcaaaccccgatgcgtggccacccggtgttcgtcgcccagcacgccactgccacctgctgccgaggctgtctggaaaagtggcacggcataccgcagggcgtcgcactggacgaacagcaaaaggactatattgtccaggctatcgcgctgtggctggtgcgcagaggcggtgccagggatgtgtccggcacgaatattttcgacccggatcgcggattgtgataaaaactgtcagtaactttcaccattcttttgacccaagatcctgacgcttacatgacagccaccttgtgcaatgaacagcaaacgcccggcgttcctcaacagatcgccacccgtctggcctttttcgtcgccggtctcggcatggccgcctgggcgccgctggtccccttcgccaaagcgcgcatcggtatcgatgacggctcgctcggcctgttgctgctctgtatcggcgccggctccatgttggcgatgccgctgaccggtttcctgaccggcaaactgggttgccgtgcggtgatcctgatggccgggctcgggttgtgcatcgatctgccgctgttggcgctgatggactccctcggcggcatggccgcggcgctgctgctgttcggcgcggcgatcggcatgatcgacgtagcgatgaacgtgcaggcggtgatcgtcgaacgcgccagcggcaaggcgatgatgtccggttttcacggtttcttcagcatcggcggcattgccggcgccggcggcgtcagcgcgctgctgtggctggggctgacgccgctgcaatccaccctgctcaccgtgctggcggtgatcgcgctgctgacgctagccagccgccatctgctgcgtgagagcggtgccgatgacggcgggccgatgttcgtcttgccgcgcggttgggtgatgttcatcggcattttgtgctttatcatgtttttggcggaaggatcgatgctcgactggagcgcgctgtttctcaccacattgcgcggcgtcgaacacagccaggccggtctgggctatgcgctattttccatcaccatgacgctcggccggctcaatggcgatcgggtggtgaactcgctgggccgctaccgggtgctgctgctgggcagcctgtgtgccgctctcggcctgagcctggccatcgccttcaatcacgctaccgtttcgctggtcggtttcatgctggttggtctgggcgcctcgaacgtcgtgccgatcctgttcagcgccgcaggcaaccagcgcgacatgccggccaacttggcgatcgcctccgtcaccaccgtcggctatgccggtattctggccggcccggcgctgatcggctttgtcgctcagttttccagcctgacggtggccttcgcttgcgtagccgctctgctgttggcggtggccgccagcgccagggccgtcactcgctgattcaggaatgcgcagccactatgcaaaataaacaattgaccataagctccagcaacattacccgctgcttcctgctgtttatcgtgctgctgacgatcggcatcggcctgtatggctacaactacaccaacgcctggctggcggaaaagaagtacacgctgaacagcatcgccggttcgctgcaaaagcgtatcgatgcctaccgctatatgacctatcaggtctatgacaaattcggcaatgcgccggcgcagaatgtcgatcccggtttgcaggaaacccgcctgcggcccgatgtctattatgtcgagaaaccgcacaagaaaaccgacgcggtgatcttcggcagccatgacgaaaacacgctggcgatgatcgccaacatctcggactacctggacacccgctggggcgccaagaccgagaactacgccatgtattacctcaatggtcaggacaatagcctcagcctgatcaccacccagccgctcaaagagctggcttcgcgctttcgggaaagctacctgaccacctcggcggacgaacgccgcgccgagatgctgcaacaggccaatatgctcgacgaacgcgagagcttttccgacctgcgcaagcagcgcttccagaacgcctattcgttctcgattcgcaccactttcaatcagccggggcatctggcgacggtgatcgccttcgatttgccaatcaacgacatcattccggccaatctggcccgcgccaatttcctgctgctgccggacgatgtcgatctcgacgatagcgccatcccggcggaaaccgtcctcggtacccatgcgacgatgagcggcggctgggtggagttcagcgccgctctgcccaatgcgccgctgaaggtgatgtatcgcgtttcggccatcaatctggccatcgatctgctgcgcaacaacatttggctgatcgcagtcaacttgctgctgctggcgctgtcgatgctgagcatctactttatccgccgccagtacattcgcccgagcgaaaacatggcggtagagctggaggccgagcgcgcgctgaatcaggagatcgtctccagcctgccctccggcctgctggtctacagcttcgccaacaatacggtgatcgccagcaacaaaatcgccgagcacctgctgccgcacctcagcctgcaaaagatcgcccatatggccgaacagcatcacggtgtgatccaggcgacggtcaacaacgaggtgtatgaaatccgcattttccgcagccagctgtcgccggacacctacctgttcctgatgcacgatcaggataaagaggtgatggtgaacaagcggctgcagcaggcgcggcgcgaatacgacaagaacgtgcaggcgcgcaaactgatgttgcacaacctgggcatcgaactgaatcagccggtgcgccagatgcacgatctggtcgaccgtctgcacagccggccggatgaggaacaacagcaggcgctgctgggccagctgacggcggcgtcggcttcggtgctggagttgatcgataacatcaccctgctgacccggctggaaacccaggactggcaacccacgcgcgaaccgttcaacccgacggcgatgatcgacgagttgctgcttgaggccctgcctgcccttaatcagaaggggctggcgctgttcaagcatttccagctggacgtcgagcagaactatatcggcgacgccaacgcgctgcgcaaggtgatctcgctgctggtgcattacgccattatcaccaccgcctgcggcaaggtttctctggttatcgaccatgagcccgaacacccggatcgcctgattttccaaatcaacgacaccggctccggcatctccaacgaagagatcagcaaccttaactatccgttcctcagccagacgctggtggatcgcttcaaccacggttccggcctcactttcttcctgtgcaatcagctgtgcaagaagcttaacggccagttggacattcgcagcaaggtggatatcggcactcgctacaccatccgcgtcgccatggagatggagaaaaaagagccgcaggagcaggaaaagctgctcgacggcgtcaccgccctgctggacatcacgtcagatgaagtgcgcggcatcgtgacccgtctgctgcaggcctatggcgccgactgcctcgtcgccgaagatcgcgcggtcaaccgcgactatgacgtgctgctgaccgataacccgcagcgcgccgatgattacaccctgttgctggcgaccgatgagccgggctggcaagcgctggataaacgctacattcgggtgaactataatctgaacggcgcattaatcgacgccgtgctgatgctgatcgaacagcaaatggccgcgctggaacaggaagaaagcccgctttcattgagctcagaagatatccaactctatgaaaaacaattgaaatcaagtgattactatgggctgtttgtcgatacagtacccgacgatgtcaaaaaactgtatactgaggcgggcagcagtgatttcaatgcgctgtcacaaaccgcacaccgcctgaaaggcgtgtttgccatgttaaatctgcttcccggcaagcagctgtgcgaatcgttagaacagcgcatcgcagaaggtgatgcgcccgagatcgagaataacatcagtcagattgattttttcgtcagcagactgctgaagcaaggtagccaacaacatgaataacctgaacgtaattattgctgatgaccatcctatcgtactgtttggcatccggaagtcacttgagcaaattgaatgggtgaatgtcgttggggagttcgaagactcaaccgcactgatcaacaatctgtccaagctggacgccaacgtgctgatcaccgatctgtcgatgccgggtgacaaatatggcgacggcatcacgctgattaaatacatcaagcgtcattatccgcagttgtcgatcatcgtgctgaccatgaacaacaacccggcgatcctgagcgcggtactggatctggatatcgaaggcatcgtgctgaaacaaggcgcgccgaccgatctgcctaaggcgctggccgccctgcaaaaaggcaagaagttcacgccggaaagcgtctccaaactgctggagaagatcagcgccagcggctatggcgacaaacgcctgtcgccgaaagagagcgaagtgctgcgtctgttcgccgaaggtttcctggtgaccgaaatcgccaagaaactcaaccgcagcatcaaaaccatcagcagccagaagaaatcggcgatgatgaagctgggcgtcgagaacgacatcgccctgctcaactacctctcgtccgtcagcatgacgccgttggacaaagactaaagcccgcctcacggcaggttaacgccaaacaggcacggcatccgccgtgcctgtttgcttttcaggcctcgctgcggttgtagcgtacctgctggctgtaataagccaatgtctgctccagcgtctccagcgtaaccggcttcgacaggcaattatccatgcccgcctcgagacagcgctgcttctcttccgccaacgcgttcgccgtcacgccgatcaccggcgcgctgaactgcatctcccgcagcgcctgcgtcaggcgatagccgtccatgttcggcatattgacgtcggtcaacacaatatcaacgtggtgctgtttcagtacggcgagcgcgtctacgccgtcgttggcggtcaccacctgataccccagcgaccccagctgatcggaaagcaggcgacggttgatcggatgatcgtcaaccaccagcagatagatatcgccgttgtccgccgcactggccttggcgggcaccggcagctgtaccagcgcctctgccgcgccgttgccgacgccgaacaaccggttgattaaggtcagcgtttcacgcggcgtagaggtgctgtgcatccaatagcctggccgggtttccagcgacgggccgatatgttcggtcgagaactggatctgagccaacagcggcgtgttcagcatcagcgggtaatcgctgagcatcacctcgccggcggcggtatcctgcccgtcatagcgctggatatcggcgccgtagccgcccagaatcgccatcaggtaactttccaggcgctgattgcggatatccagccacagccgccggccctgccaggtatcgctggcctgcgggatcgggaactgggcgttaaacaatggaatgcgaatgctgaacaagctgcccagccccggttcggactcgacggagacgtcgccgtccatcaggttgaccaacttctcgcagatcgccagccccaaaccggttccctggaagtggcgctgcacgccggttcccacctggaagaacggatcgaacaggcgcgagatttccttctccgggataccgacgccggtatcgcgcacgctgaactccaggtaactgccgcgggtgcagacctgcagcacaatacagccggtatcggtgaacttgatggcgttgttcaccaggttggacagcacctgctgcagccgcaccggatcgccgaaaatgcgctccggcacgttctgttcgataaagcagtacagccccagacgtttcttcaccaccagcggcaaatagttgccggcgatatgggtgatcacctccaggcaggagaactcgcgcggttcgatcttcagctgctcggactcgattttggagaaatcgagaatatcgctgatgattttcagcagcaggccggaagagttattcatcgcgttgaccagccgatcgaccccttgcggcagcgccttggtctgcagcaaatcgaggttgccgataatgccgtacagcggcgtgcgcaactcatggctgacggtggccaggaacatcgatttggactggctggcctgctccgccgccgccgccatctcctgcagcgactcttccatcttcacgcgcgcgctgacgtccaccagtacgcagatcgccacttcttcgttgcggtagcgcgagtggacaaagctgatctgcaggttgttattgttgctggtcatcacatcgacgaaattcgcctgctgttcgcaaatgatgcgcgtaatgcgatcgcgatcttcgtgggtcaacaggttgatgtagttgtgcgccagttcgttactcaggatattggtgccgtcgctgatacgcaggatgcagatgcccaccggtgccgaggcgacaatcttgcggttgaactgctcgtgttcttccagacggaaggcgttctcctccgccggcaagaacatcttgcgctcaaacagccacgccagcgtgaacagcacgatagccgataacaggttcagcaacagcgcgttgaggatcagcatcttgaagcgttccaccacgcttttcaccggcagcgcataaacgatgctcagcgatgaaggcggcagcgcttttttcaggatcagatcgcggtagttgtcgacataaccgaagtaagcatgctcttcggggtagctgttgagcgcagcggcatagcgatcgccatccgccaggcgcagtatcggatcgttgttttcatccagcagcgtgacgccgatcggcaggttgccggcggtgacgaaatcttccagccggacagtttgctcgatgcccagcagcgcctccagcttgttgccgatatagagaggcgtcagcacatacagataaccgatatcaggccgctgcgcgctggggctaatccaatacaggttgttgtctttgtccagattcttggcgttgcggtatttcagaatgcgctcgtgcagcaacttcagcatgttttcccggttggcgaccgcgttgccgccgccgaattccgccagacacaggctgtcgccgccgatgaagaacacccggttgagatcgtaggccgccacgaagttctctttccaatactggatcaggccgctcagcgaatcgagtgaactgcggtaagtggcgctcagggcgcagttagactccggatacagcgggtagaattgcggtgggctgcccttgccggggatcacgccgctgaacatgtccatgccgctgaccgaaccgttgaggcggttttccgccatgtacttgatgtcgcgtatgatgtcggcagaatggcggatatagccctgcgcctgatcgaaattgaggttgtactcctggcggatgtccgattctttctgatgcaggatattcagaatataaaaggtggtgagcagcgcccccaacgaccacagcaaaatcgccagcacccggaacaaatagcgggatattttcagcgtagttcgaaaagaggctaagtatttcaatcggataccatacgaaagtcagtgacggcgcgcgttgtcgccggcgcggcggccggcggctcggtgcgccaattaaaccatataactgaaaaagggcctagcatcgctgccaggcccttttgtctcagtgcattacggtgtcggcatgccgacgccctcaccttgcttaaacgttgtcgtcgtccatcggctcagccgcgtcgtcgccatcgtccagcggcgtgctgtcttcttccaccgcttccgcgcccggttccaggctgtccagctcttcgtcttccaccggttcggccacgcgctgcagaccgacgacgttttcgtcttccgccgtgcggatcagcgtcacgccctgggtgttacgaccgaccacgctgacttccgaaacgcgggtacgcaccagcgtgccggcatcggtgatcatcatgatctgatcgctggtttccacctgcaccgcgccgaccacctggccgttacgctcgctcaccttgatggagataaccccctgggtggcgcgtgacttggtcggatactcggtcaccgcggtgcgtttaccgaagccgttttgcgtcacggtcaggatgtcgccctcgccgcgcggcacgatcagtgagatcacgctgtcgccttcgccgaggttgatgccgcgcacgccggtcgcggtacggcccatcgaacgcacctgcgtttccgggaagcgcacgactttaccgttggcggagaacagcatcacttcgttgctgccgtcggtcagatcgacgccgatcagctcgtcgccctcgttgaggttgacggcgatgatgccggcgctgcgcggacggctgaactcggtcagcgcagttttcttcacggtaccgctggcggtggccatgaacacgtggcgcccttcttcatactcgcgcaccggcagaatggcggtgatacgctcgtcggcttccagcggcagcaggttgacgattgggcgaccgcgcgcgccgcggctggcttcaggcagttggtacaccttcatccagtacaggcggccacggctggagaagcacaggatcgtatcatgggtgttggccaccagcaggcgatcgataaagtcttcttctttaatacgcgcggcggacttgcctttgccgccgcggcgctgcgcttcatagtcggacagcggctgatacttcacgtagccctggtgagacagggtcaccaccacgtcttcctggttgatcaggtcttcgatgttgatgtcggaagtattggcggtgatctcggtgcggcggccgtcgttgtacagctctttgaccgccaccagctcttcgcggatcacttccatcaggcgctctgggctttccagaataaagatcagctcggcgataaagttgagcagctctttatattcgtccagcagcttttcgtgctccaggccggtcagtttctgcaggcgcagatccagaatagcctgagcctgctgctcggtcaggtagtatttgccgtcgcggatgccgaactccggctccagccactcagggcgagcggcgtcgtcaccggcgcgttccagcatggcgctgacgttgcccagatcccacggctgagccaccagcgcgactttcgcttccgccggcgtcggcgcacggcgaatcagctcgatgatcggatcgatgttagccaacgcgatagccagcgcttccaggatatgggcgcggtcacgggccttgcgcagttcgaagatggtgcggcgggtgaccacttcgcggcggtggcgcacgaaggcttcgaggatatctttcaggttcagcagcttaggctgcccctgatgcagcgcgaccatgttgatgccgaaggtgacctgcagctgcgtcagcgcatacaggttgttcagcaccacttcgccgaccgcgtcgcgtttgacttcgatcacgatgcgcatgccgtctttatcggactcgtcacgcagcgcgctgatgccttctacgcgtttttctttcaccagctcggcgatcttctcgatcagacgcgccttgttcacctgatacgggatttcgtgaacgatgatggtttcgcgcccggtcttggcgtcggcttccacttccgcgcgcgcgcgcaggtagactttgccgcgcccggtgcggtaggcctcttcaatgccgcggcggccgttgatgatcgccgccgtcgggaagtccggccccgggatgtgttccatcagcccttcgatgctgatgttttcatcgtcgatataggccaggcagccgttgacgacttccgccaggttgtgcggcggaatattggtggccatgcccacggcgatgcccgacgagccgttgaccagcaggttcgggatcttggtcggcatgacggccgggatctgctcggtgccatcatagttaggcacgaagtcgacggtttctttttccagatccgccaacagttcgtgagcaatcttggacatgcgcacttcggtataacgcatcgccgccgcggagtcgccgtcgacggaaccgaagttaccctggccgtccaccagcatgtagcgcagtgaaaacggctgagccatacgcacgatagtgtcgtaaaccgcgctgtcaccgtgcgggtgatatttaccgatcacgtccccgacgacacgggccgatttcttgtatggtttattccagtcgttacccaatacgctcatcgcgtacagaacgcggcggtgaaccggcttcagtccatcacgaacatctggcagcgcacgtccgacaataacggacatcgcatagtccagatacgagtttttcaactcgtcttcgatgtttaccggtgtgatttctctggcaaggtcgctcatggagctgctatccctctactaatgattcatctgcccgctgccatagtggcaaaggtgtaaaactatatcacaaagcacgctttacgggaaaataaccgccgctgtttcacggaaattgtgcagataagtgcgctaaaaacgcatcggcacagacgatgccgcgccggaacatgtataatccgcgcaacgagaacaaggagccagacaagcccatgaacgcagaatcatccagccgagtgcaaaacgttgaccaccaggaaatcgccaagttcgaggccgtcgcctcccgctggtgggatctggaaggcgagttcaaaccgctgcaccgcatcaacccgctgcgcctgaactacatcatgcagcgcgccggcggcatttttgacaagcaggtgctcgacgtgggctgcggcggcggcattctggcggagagcatggcgcgcgaaggcgccaaggtaaccgggctggacatgggcgcggagccgctgcaggtcgcccggctgcacgcgctggaaagcggcatggacgtcacctatgtgcaggagacggtggaaagccacgctcaggccaacccgcagcgctacgacgtggtcacctgcatggagatgctggagcacgtgcccgatccggcctcggtggtgcgcgcctgcgcccaactggtgaaaccgggcggccacgtgttcttttccaccatcaaccgcaacaccaaagcctggctgatggcggtgatcggcgcggagtacgtgctgaagatggtgccgcagggcacccacgatcataagaagtttattcgcccttccgaactgatcggctgggtcgacggcacgccgctgcgcgaaaagcacatgatcggcctgcattacaacccgatcaccgatcatttcaagcttgggcgcaacgttgacgtgaactacatggtgcacacccagcacgaaggctgagcgctgtaaaccgcgccggccctgcgttatcggggttcggcgccaacgcgctgttaggaaaaatacctaatttccgcgacttcgatcaaaatcgtggttgtagacagttttttagaatattaaatcagatcaatatgccgtttttttctaacgtttaataaagcgccaaacgatcggttttttcagtttttcagtaaaatctgatctcgcttattgacaagcttgtcgcgccagtcacggcgcgcactgcgaacggcaagttacatttcacccccaagttatccacaaattaggccggttttgttcacttgcaaacgccgttttttctcactatcttgttacctcaccgacatacaacccctatatatagtgtttacatactgagcagagcgactacacttctgcttaggggcaccatacggacaggtaaaacaccacatgaaccaaagtctgcttgtaactaaacgcgatggccgtaaagagcgcatcaacctcgacaaaatccaccgggtcatcgattgggccgcagaaggattgcacaacgtctcggtttctcaagtagagttgcgttcccacattcagttttatgacggcatcaaaaccgccgatattcacgaaaccatcatcaaagccgctgccgatctgatctcccgcgatgcgccggactatcagtacctggccgctcgcctggcgatcttccacctgcgcaaaaaggcttacggccaattcgagccgccgaagctgcacgctcacgtgacgcgcatggtcgagatgggcaaatacgataaacatctgctggaagactacagcgctgaagagttcgagcagatggactcctttatcgatcactggcgcgacatgaacttctcttatgccgccgtcaagcagctggaaggcaagtatctggtgcagaaccgcgtcagcggcgagatctacgaaagcgcccagttcctgtacatgctggtgtccgcgtgcctgttctccaactacccgcgtgaaactcgcctggactacgtcaaacgtttctacgacgcgatttccaccttcaagatttcgctgcctacgccgatcatgtccggcgtgcgcaccccaacccgccagttcagctcctgcgtgctgatcgagtgcggcgacagcctggactccatcaacgccacctccagcgccattgtgaaatacgtttcgcaacgcgccggcatcggcatcaacgccggccgcatccgcgcgctgggcagcccgatccgtggcggggaagctttccataccggctgcattccgttctacaaacacttccagaccgccgtcaaatcctgctcgcagggcggcgtgcgcggtggcgcggcaacgctgttctacccgatgtggcacctggaagtggaaagcctgctggtgctgaaaaacaaccgcggcgttgaaggcaaccgcgtgcgccacatggactacggcgtgcagttgaaccgtctgatgtaccagcgcctgatcaaaggcgaagacatcaccttgttcagcccgtccgacgtgccggggctgtatgacgcattcttcgccgatcaggacgaattcgagcgcctgtacacccagtacgagaaagacgacagcattcgccagaagcgcgtgaaagcggttgagctgttctcgctgatgatgcaagaacgcgcttctaccggccgcatctacatccagaacgtcgaccactgcaacacccacagcccgttcgatccgcagatcgcgccggtgcgtcagtccaacctgtgcctggaaatcgccctgccgaccaagccgctggaagacgtcaacgacgagaacggcgaaattgcgctgtgcaccctgtccgccttcaacctgggtgcgatcgacagcctggacgatctggaagagctggcgaccctggcggtgcgttcactcgacgccctgctggattatcaggattatccgatcaaggccgcgcaccgtggcgcgatggggcgtcgcaccctgggcattggcgtgatcaacttcgcctattacctggcgaagaacggcgtgcgctactccgatggcagcgccaacaacctgacccacaaaacgttcgaagccattcagtactacctgctgaaagcctccaatcgcctggctcaggaacaaggcgcttgcccgtggttcaaagaaaccacctattcgcagggtatcctgccgatcgacacctacaagaaagacctggatgcgatctgcaacgaaccgctgcactacgactgggaaaccctgcgtaaagagatccaggaaaccggtctgcgcaactcgacgctgtccgccctgatgccgtcggaaacctcttcgcagatttccaacgccaccaacggcatcgagccgccgcgcggccacatcagtatcaaggcgtcgaaagacggcatcctgcgccaggtggtgccggagtatgagcgtctgaaagacaactacgagctgctgtgggaaatgccgagcaacgacggctatctgcagctggtggggctgatgcagaaattcatcgaccagtcgatttcggccaacaccaactacgatccgacccgcttcccgggcggcaaggtgccgatgaagcagctgttgaaagacctgctcaccacctacaagttcggcgtgaaaacgctgtactaccaaaacacccgcgacggcgcggaagacgcccaggaagatttgcagcctgccaaggccggcgatgacgactgcgaaagcggcgcctgcaagatctaaagtttgacctagcgggccggaattttccggccccttcatttagccacgttacgatggattcaggcttatggcttacaccactttttctcagaccaaaaacgaccagctgcaagagccgatgttcttcggccaatcggtaaacgttgcgcgtttcgaccagcaaaagcatgaaatcttcgaaaaactgatcgaaaaacagctctccttcttctggcgcccggaagaggttgacgtctctcgcgatcgcatcgattatcaggcgctgccggagcacgagaagcacatcttcatcagcaacctgaagtatcagaccctgctggactccattcagggccgcagcccgaacgtcgccctgctgccgctgatctcgatccctgaactggaaacctgggtggaaacctggtcgttctccgagaccatccactcccgttcctacacccacatcatccgcaacatcgtcaacgatccggcgctggtgttcgacgacatcgtcaccaacgaagagatcaagaagcgcgcgaaagacatttccggctactacgacgatctgatcgagatgaccagctactatcacctgctgggtgaaggcacccaccaggtgaacggtaaaactgtcaccgtcaatctgcgtgcgctgaagaagcagctgtacctgtgcctgatgagcgtgaacgcgctggaagcgatccgcttctacgtcagctttgcctgctccttcgcgttcgccgagcgcgaattgatggaaggcaacgccaagatcatcaagctgatcgcccgcgacgaagcgctgcacctgaccggcacccagcacatgctgaacctgatgcgttccggtgcggacgatcctgaaatggcggagatcgccgaggagtgccagcaagagtgctacgatctgttcgtgctggccgctcagcaggagaaagagtgggcggaatacctgttccgcgacggctcgatgattggcctgaacaaagacatcctgtgccagtatgtggaatacatcaccaatatccgcatgcaggcggtcggcctcggtctgccgttcgaaacccgctccaacccgatcccgtggatcaacgcctggttggtgtccgacaacgtgcaggtagcgccgcaggaagtggaagtgagctcctacctggttggccagatcgactcggagatcaacgccgacgacctgagtgacttcgaactgtaagcgatggcgacgccaaccgtaacgctgcgcgccgccggcacgcagctctcttgccccaacagtgaaaactgcctgctcgacgtgctggagctgcacgacgtgcaggtggagtaccaatgccgctccggttattgcggcgcctgccgcctgaagctggtgaaaggcgaagtggcctaccgccaacagccgctggcgtttatcaacgccggcgagatcctgccctgctgctgcatgccgctgacggatatcgagctggaaatgtaaagtcgggtgccggaaaccgcgcctggagaccagaaggcggggttgcccccgccctatgattaccgcttcacctcacacgccaacctgatcaggatagtgatattttcctggtagattttcagctcgcacagcgagtctcttatcatccagataaataacaaaaccgtaatacatacaacggttagcgagtgaaacacatgccttaagcgcatgcttgcctccttgctgtgaaggggctaccataccggtgtctaggcggtatgtgcagccccattctgattgagagtcagtctggggctttcatctatccgccttgtcacacaatgcccaagacgaacagtctcaagcacccgtcaagagagtaaccgcattccctcaccgcgaatatcccctataagattatgattaatcagggatatataactatcctcaaagtatttcgcttagcgcccctttcccgccgatgtggaaaaataacgcgccggggaatcgccgaaggctttacgaaacatggcgataaaattgctcggcgaggcataccccagcgcctccgcaatctgcagcaccgtttcgccttcggccagcttcgccaacgcatatgacaaccgggcctgctggcgccactgggcaaaactcaaccccgtctcgccgatcatcagccgccgcagggtacgcggcgacatcgccccccattcagcccacgcctccagtgaacgttcgctccccggttgcgccagcaaggcctgcagaacgccggccaggcgcggatgggacgacatcggtaaatacagcggctccgtcggcgcctgacgtatctcatcccgcatcacctgcgccatacgatcctgctccagggtaagcgcgcagcgtttatcccagccttccgcacgctgagccagcgcctgcagcacggcgctgatgccgataacgcaaggtgtattcgacagctcgtggcaggcctccggcgccagcagcaaactccagccgctcagcgcgccgcagacctgtacccggtgctccgtcgccggcgggatccaacccgcccgctgaggcggcagcacccaatcgccctgcgccgtgcgtacatgcaacaagccgctttcgacgcacagcaactgcccgcgcacatgctgatgccagtcgtattctcgcgtgcccaaccgatactcccggcctgccgcatcgcggccgccaagcgcgataagccaggggcccgccgaccattcgctgcagtcagcgtcgagggcatgaaggtttgcatccatattggccactaatcactatttttagtccagataccgttataccaaccttttcctgcgccgacataatgaaatgcttccggccgctaccgtctgtggccactgtttcacgagggaacatgatgacaacactcagcattggcattatcggtgcagggcccggcggcctgtgtctggctcagggactgcgccgcttcggcatccacgccacggtatttgaacgcgacgccacaccgcaggcgcgcgatcagggctaccggctgcgcatcgatccgtcgggccagcaggcgctggccgcctgcctgccgccggcacactaccggttgctctgcgccggcagcgcgcaaaacagcggcgagagcaatctatgggatccgcagcttgccccgctcaccagccgacgccccgagcactggttgccctccagccagcgccaaacgcaagaaccgagcggcgatctcggcattcatcgccaaacgctgcgcgagatcctgcttgccggcctgcaagaccaggtgcgcttcggccataccttgcgtgaatttgcacaaacgccgcagggcgtggaactgcagttcgccaacggcgagcaagtgcgggtcgatgtgctgatcgccgccgacggcgtcaactcgctggtgcggcggcgctgcctgcccgaggcggggcccgaagacagcggcgcggtcaccctttacggtaaaacgccgctcgatgcggcgacccgggcccaattggcccccgagctgctgaacggcgtatcggtgatcttcgccgacggcgtgtcgctggtggttgaaccgatgcgctttcaggcccccatggcgcagctggcggccgactacgcacccgattgccgcctctcaccggtcgacgactatctctattgggcctgtatcggatcggctgggcgtctcggcgggccggtgcgaactgagggaaccgctgcgctgcaggcgcgcgtacggcatatctcgcagggatgggcgcccgccttgcaaacggcgttagcgctggcggatcccctgtcgctcagcgtgcggacggtgcaggttacggcggcgataccagaatggcacagcgaacgcatcgcctttctcggcgacgccgtgcacgccatgagcccggcgggtgggctcggcgccaacaccgcgctggtagacgccgccagcctggcggcgcatctggcgcactcagacagcgccgcgcaggcgctcaggaactacggtacagagctgcaaacgcgaggcgccgcggcaatacgtctttcacgcctggcgtccgaacggctgatgcagcgcgatgaagccgacaagacgggagactcagcaacgccaatacccgtcactcgataatttccaccacctccagccaggcgtttttaccgcacgcctggctcccattcagccaacggcgcagcatatccagcgccagcatcgccaccgactcctgccgcagccgcaggccgtggcgcgacgcgcgataacgcacggtctggccaatgccgccgcgcggcgtgtgcagcgcaatgctgacctgctcatcgcgcatggcgctgaccgccaacgccaacggtgcaccggtcaattccgccagcgagcgggcgcgcgccagcgtcgtttccagcgtttcgatgcagtgcgccggcagcagctcgccacccgccagcggcgccccttcgctctgcagctgcagattgatcaaaccgccgctgaactgctcgctcaacgccagcttcagcccttgctgattcagacgctgcgtcagcgtcgccggcaacccgtcggtgccttcaaagatgcagttgtcccccgccacttcgcgcacgcgtcgccaggccagctccatctccgcacgccggctttccggcccggtcagcttcagttcgatgatcgggctggaggaacggtaacccaacaccacgtccggcggcagcggcaggctgtccagctcggcggccagatcgctctcggaggtgccgaaggtcgtcaggcgcaggcacagcggcggcgccggcaaggtgaagcgctggcgcagacgcggcacgatctgctgttcgaccatcactttgaattccgacggcacgccgggggtgaagaacatcaggcattggttcagctgcagcgcgaacccgcaggcggtgcctaccgggttatccagcatttccgcgttggccgggatctgcgcctgcttgcggttggaaggggccatcggccgcccgcgctcggcgaaataggcttccatgcgcgccaaccagtcagcccgttcgaccagctctacgccgctggctttcgcggcggccagcgcgctgagatcgtcgctggtcggccccaggccgccgttgacgatcaacacatcggcgaggtggctgcgttcctgcaggatctcgatcaacgcagagaggctgtccccgaccgtttcacgcccgctcatcggcaccccctgcaggaacaggtagtccgccagccaggcggcgttggtatcaataatttgcccgtgcagcacctcatcgccggtgctgagcatctccacccttaacattgatctctcccacattttttggtcattccactatagaagcccgtaaataacttttcactagccgcctgcggataatttcagccatgggttcgtttctcatgtgccatgccggtcgccactatgtaaacatttgtgtacatcatgcgtaacgtcggtttgacacaaattagggcttccactatcctgccatcctcataaatcgttacctataattttcaaaatctttcggctggtagagaaaaaacgtgaagaatcgcactcttggcagtgtttttatcgtggcgggcaccaccattggcgccgggatgctggcgatgccgctggcggcggccggcgtcggcttcggcgtcacgctggccttactggtcgggctgtggctgttgatgtgttacaccgcgctgctgctggtagaggtttaccagcatgagcaggcggataccggtctgggtaccctcgccaaacgttatctcggcggcggcggccagtggctgaccagcttcagcatgatgttcctgatgtacgccctcaccgccgcctacattagcggcgccggcgaactgctcgccaccagcatcagccaatggacatcgcaggacttcccggtgtcgctcggcgttctgttgttcaccctggtggccggtggcgtagtgtgcatcggcacccactcggtcgacttgttcaaccgcatcctgttcagcgccaaagtggtatttctggtggtgatgctcggcctgatgttgccgaatatccaccaaaccaacctgatgacgttgccgctggagcaaggcctggcgctgtcggctattccggtgatcttcacctccttcggcttccacggcagcgtgccgagcatcgtcaactacatgggcggcaacattcgcaaactgcgctgggtgtttatcatcggcagcgccatcccgctgatggcctatatcttctggcagctggcgacgctgggcagcatcagctccgacaccttcgtcggcattctggcgcagcaggccgggctgaacggcctgttgcaggcggtgcgcgacgcggtggcttcgccgcacgttgaactggcggtgcacctgttcgccgatctggcgctggcgacctcgttcctcggcgtggcgctcgggctgttcgatttcctggccgacctgttcaagcggcaagataacgtgcgcggccgcctgcaaaccggcgccatcaccttcctgccgccgctggccttcgcgctgttctacccgcgtggtttcgtgctggcgttgggattcgccgccatcgccctgtcggtgctggcgctgctgctgccttcactgctggtgtggaagacgcgtcaaaagcatcaggcgcagtatcgcgtctggggcggcacccctgcgctggcgctggtgtttgtctgcggggtaacggtgatcgccatccaactgggcatcgccagcggcatgctgccggcggtcgggtaagcgacgaaagacaagaaatgataaagagaaaggggccgcaatggcccctttttgctgagcgtcagaagctcagccctacgccgacataagggccatcggccagggtgttgtcgcgacgcccgtctttgccttccatctgcatgtaacggtagcccacgtccacgctcagcggacggaacttccagcgcaggccgccgctggcttcgttataggccttcacgccgctggtgaaagactcaggggcaaagtaaccttcgccgtgcaggctgaagtaacggttaatctcccactccaggccgccgcccagcgccaccgccccgccgctcttcccgtctttcgggctgaggtacagcgctttggcgcccacggtcgccgtcaacggccccagcggcacgccgaagttcaaccccacgctgccgacgttgccgtcgtggtcgctgcgcgcccagttgccggtcaggcccagacctgaagagccggtgctcatgccaacgcccaggttggtgtagtgctgcccggcttcgcccgacacgctgatggcgttcgccgcgccggtcaccaacagcaatcctgccgcgcacgcgacccaagtctttttcatcatctttccctctggtttgtcatccgtatcgaatgttcgaatcaacgcataataataacgtcacgagtctataccaaagcgcaatgcgtatttaagggataaaagcgaaaaaattcttcaataatcaaataaatgtaaatatttgcaaacaataatctatattcgtcaaggcgatgccaacgataaccgagacctatttgccgtcgctcggcaatagggctacaactagtagtggctttgaccaaggtcaggggaagaagccccgccaaaggactatgctgatgaacgcttaaaccgcccgagtctttacttaaatgcactacgataaggagcaagtgatgagcaagaaaggactgaccaccgcagccggcgccccggttgtcgataacaataacgtgatcaccgcaggcaaacgcggcccgatgctgttgcaggacgtgtggttcctggaaaaactggcccacttcgaccgtgaagtcatccccgagcgccgcatgcatgccaagggatccggcgcctacggtacctttaccgtcacccacgacatcacccgctacacccgcgccaagatcttctccgaaatcggtaagcagaccgacatgtttatccgcttctccaccgtcgccggtgaacgcggtgccgccgacgccgaacgcgacattcgcggcttcgccatgaagttctataccgaagaaggcaactgggatctggtgggtaacgatacgccggtgttctatctgcgcgatccgctgaaattccccgatctcaaccacgtggtgaaacgcgatccgcataccaacctgcgcaacccggtctacaagtgggacttcttctcccacctgccggaatcactgcaccagttgaccatcgacttcagcgatcgcggtattccgaagtcctaccgccacatgcacggcttcggcagccacaccttcagctttatcaatgccgccaacgaacgtttctgggtgaaattccacttccgctgcgaacaaggcattgaaaacctgatggatgaagaggcagaagcgatcatcgccaaggatcgcgaaagctcacagcgcgatctattcgaggcgatcaaacgcggcgacttcccgcgctggaagctgcaaattcagatcatgccggaacacgaggcctcgcagacgccctataacccgttcgatctgaccaaggtgtggccgcacggcgactacccgctgatcgacgtcggttatttcgagctgaaccgcaatcccgacaactacttctccgaggtcgagcaggtggcgatgaaccccgccaacgtggtgccgggcatcagtttctcgccggataaaatgctgcagggccgtctgttctcctatggcgatgcgcaccgctaccgcctgggcgtcaaccaccaccagatcccggtgaacggcgccaaatgcccattccacaactaccatcgcgacggcgcgatgcgcgtggacggcaacagcggcaatggcgccacctacgaaccaaacagcttcggcctgttccaggagcagccggacttcagcgaaccaccgctgagcattgagggcgcggccgaccactggaaccatcgtgaagacgacgattactacagccagccgcgcgcgctgttcaacctgctgagcgccgaagagcaccagcgcatgttcacccgcatcgccggcgaactgtcgcaggtgccggaacagatccagcgccgtcaggtcgagctgttcaccaaggtgcacccggactacggcgccggcgtcgccaaggcgttggggctgaaataacccccctgcagccatccactcagccgccctttcaggcggcttttttatgcctgggagaaacgctgcgccacccactgctgcaattggcggcgcgaaatcttgatgccgccgtttttcagctcgtcaggcagcggaagcaatgccgtcgggcgttggaaattggccagcttatcctgcgaccaggcgagcagcgcccccaacgacagcgccggatcgccgtcgatcaccgccaccggccgctggccgaactcagcgtccgccatcggcaccacaaacgcctgcgtgatctgcgggtgcgccgccagcacacgttcgatatcctcgggctgcaccccttcgccgccgctgaaaaacaggttgtccagccggccgagaatgcgcagttccccctccgccatcacgccgcgatcgcgggtcgcgaaccagccctgctcatcggccaacggctgcagatgcccatgacgccagtagccgagcgccaggctgtcggcgcggatccagacctcttcgtccaccagttttacttcgcggccgccgagcggcaggccgacacccggccgcgcatcggcgcgcttggcgcacaccgtggaggccagttcggtcagcccgtagccgcaccagcagcggatccccgccgcctccgcccgttcggtcagctccaccgggatcatcgcgccgccgagcagcaccgctttcaacgtcatgcccgtcagcggttgcgccaacagccgccagagctgcgtcggcaccagcgaagcatgcgtgcagccagccaatgcctccgccagcgggtgcgtctcgcgcaccgccagccgcgcgcccgccgccaaccagcgccagacgatgccctggccggagacgtgaaacagcggcagtgacagcagccagcaatcctcgcgttgaaaatccatcagctgcaacaccccggcggcgctggccagatggttggcgtagctgtgtgccgccgccttcggcatgccgctggaaccggaagtcaacgtcagcgtcgccagacgctgcgcatcccacgtcggcaggtctggccaacgcggctcggtcgagggaggcgtcaatcgaatcacctcttccggcagcgccagcaacgagtccgggccgaagacaaaggtcatatccaattccggcaacagctgcgccagcagcggcgccggcaaggcgggattgagcggcaacaggcgtgcgccgcactgcaacagcgccagataggccagcagcagtggatagctgtttttaccgcacagcgccacgccgcagcccggttcaacgccctgatgctggaaatccgccgccagttcatccacctggctttgcaacgccagccagctcagcggttgttcgccgagcaacagcgccgtcgcctgcggctgaaggcgcgcccagtgccgccacggccaatcgttcaacggcgccatagacactccagcgccgaaacatccagcagcggcaacgcgcagcccggccacgggcgcagcacctgcgcctgcatcaatcccagcgtgtccaggcccggcacggtatccggcgtcagccaatgggcaatgcgcgccagttgggtcaaccccaggctggattcgaggctggaactgatcactgccgtcaggcccgccgcgtgcgcctgcgccaccagcgtctggcaacgcgccaggctgccgaccagcgtcggtttgatcacgatggccgccacgcccggctcggcctgcaccacaaaatccgcctcgcgcacgctctcatcccaggcgatggcaatgccggtcgcccgggcgaagtcgcgcgattcatcacgggtcttgcagggctcctccaaaaaagcgatgcgatcgcgccacgctgggttaacgtacctggcgaagccgtcggccttggcgcgggtccagctgcggttggcgtccagccgcagccgcagatccggcagcgcctccagcagcacgttgacgatcatgccgtcacgcaccgcctcatacagccctactttcaccttggcgactttctcgcccggcaaagcgctcaatgtctcgaacagctcgtccggatcgccgctgcacagcggcgccttgcgaaaatccgcctgcgtcggcaaacgctgctccagctcggcctgcgcgcagctcagcccaaaggccaccgagggcagctcgctgtcatccggttcgttgcccgccagccacgcctgcagccagtccaatgcggcccgttcggcctgcgccggcgtttcccggctgaactccggcagcggcgcgatctcgccccacccctcacgctcgccctgacacagctgcaccacccatccgtcacgcgttttcaaccgctgattgcgcagcaccacgcccgcctccatcggcaggctgtaacggtatagcgccgcgctgcggtttgccccgctcattacgggttacgcttgaatttgctgaaatccggctggcgcttctcgttgaacgcgttgcgcccttcctgcccttcgtcggtcatgtagaacagcatggtggcgttgcccgccagctcctgcaaaccggcctggccgtcgcagtcggcattcagcgccgccttcaggcagcgcagcgccatcgggctgttctgcagcatttcgcggcaccagcgcaccgtctctttttccagatcggccagcggcaccacggtattgaccagccccatgtccagcgcggcggcggcgtcatactggcggcacaggaaccagatttcgcgcgccttcttctgaccgacgatgcgcgccatgtaagacgcgccccagccgccgtcgaacgagcccactttcgggccggtctggccgaagatggcgttatccgccgcgatggtcagatcgcacatcatgtgcaacacgtggccgccgccgatcgaatagccggccaccatcgccaccaccggtttcgggcaggtgcggatctggcgctggaagtccagcacgttgaggtggtgtacgccgctgtcgtcgcgatagccgccgtagtcgccgcgcactttctgatcgccgccggagcagaatgccttatcgccggcgccggtgagaataatgacgccgatgccgtcgtcgtaacgggcgttggccagcgcgtcgagcatctctttgaccgtttgcgggcgaaacgcattgcgcacctgcggccggttgatggtgattttggcgatgccgtcggcggacttgtgatacagaatgtcttcgaaatcgccggtgcaatcctgccaggcgatggcggcatacagctgttcttcattcggataaagcatgttcggttcctttaaccagggttaacgagaaaggtctgcagctcggcgacgaactcctgcggattggccagatgcgcgttgtggccggcctgcggcacgatgcgcaacggcaacccggcgtcgcgcgccagccgttgaaatttggggtcgttctcaccgcacagcacccgcagcggcacggtcagttggcgcagctgcggcgccagatagggctgccgcccgagcgatgtggcttcgagcatgtcggcgatcgccgggccgctgttgatcgaacgcgcagcgatcagcgcctggcggtgcacgtggctaagctctttgaacaccggttgctgataccagtccgccaggacttcggcaatcggctcactgcgaaaacgcgccgcccatcgcgcatcctgctcgcaacggtcacggcgcagttgttcgtcctcaagccccggattgccgccctcgaccagcacgccttgcaggccgtcgtggcgtccgtggcaagcgtgatacatggcgatgcgcccgccaagcgagtagcccaccagccaataacgctcgatgttgcgcagttgcagggtcgcggcgatttgcgcgctgatgtcgtcgaagccgcggcagctcaccgccacggaatcgccgtggccgggcagatcgatggccaacgacggccattccgggcagcgcgcggcgatcacccgccattcattgttgttgccaagcaggccatgcaaccatatcagccaggggcggcccgcttcgccctgttgcaaaattcgcgtcgccagcatcattgcaccgccatctgttgcaccaggtcttgcaggctttcggcccctgcgctcggcggcacctgtagctctatcaacgtggcgccgccgcgccgccagccttgctcaaccgcctgttgcagctggctccagttttccggccgcgcatagtcaagctggaacatcgccgccgcgtggctgaactcaacgttctgcggcatgcagtaaaagcgctgacgctcctcttccggcgtcggcagcagcgagaaaatttggccgccgttgttattgacgacgatcagcaccgtcggcgccgaacagtggcgcagcagcgccagcgcattgaggtcatacagggcagaaaggtcgcccaccaccgccaacgtcggcctggcggtggcgcgctgtacgccggcggcggtggaaatcagaccgtcgatgccgctggcgccgcggttgctgaataccgggtaaacggcaggcagcatcgttaacgcgtcgatcagtcgcaccaccaggctgttgccgagaaacagctggccgttctccggcagcagttccggcaggcggtgcgccagctgcgcttcgccaaagttatcgtgcagatgcgtggacgccgccgtcagcgctttatccgccagcgccgccagcccggcggcccacggcgcgcgcggttgcgcgggatgctgcgccaaccactgcgccacgccggcgcgcaggcgccgcccccggtgttgggccggatcgagccgccccggcagctcgtcgataatccaatattcttccggctgacactgcgcctgccattgcagcaggcgtttgccggtcaggctgccgccgaactgcaccaccagctgcgcatcttgcagtacgcgctgcgcctgcggatgcgcgagccacaaatcggcgcagggcagcggttgcccggtctgcgacagcacatcgccgatcagcggccagcccagcgtttcggcccagtcggccacctgcgcgccctcttgtgcgctcatgcgaccggccagcaccacgccgcgcttttgccgccaggagaaccagtccggctgcggcgacggcgccgtacgcgtctcgctttcctgcagccacggacgatcgctctgccaccagtcgcccagcgcggcggaccaatcggcatagtgacgctcatcgccgccgtacagcggttcggcgaacgggcagttgatatgcaaagcgccatgctgcaggcgcgccatcgcgctgtcgacgctggaggccagccacgcggccggaatatccggcgtcggacgcggcagatcgatcgccaacgtcgggtggctgctgtagagaccgttttgacggatcgcctgattggcgccgcagtcgatcagttccggcggccgatcggcggtgagaaacaccagccgttcaccggtcaggccggcttcgatcaacgcgggataaaggttcgccgccgcggtgccggacgtaacgatcaccgccaccggctcacgcgccgccttcgccagcccgagcgccaaatggccgagcccgcgctcatcaaaatgggtatggcagataaacgatcggttggccgcggcggccagcgtcagcggcgtggagcgcgatcccggagcgatacaaacatgccgcaccccatggcgggccagcgcctcgagcagcacagccgcccaccggcgattaaaaacacttgtcgacatagttcgctcacaagtcagttagcagagatcgtccccggcgcagccgacggacgccgcgcctgtagttacgttctgtattatatgaggtgttattttcacggcttttgcgccagcgcaagaacgccgtatatccctgggtgtttacaccagataattgtttgatttagaacaaaaaacaaacaattaaaacacaaacactttacacttgcggcgacgccggctcaatccgtccatacaaaaacaagggagataaaggtgctccaacggcggccagcgggaagtataggcgggataagggaaagcgatcggggaaacggcgggatgaacgacacagtctgcagaaaagcacgaggcggcctgcgccgccccgatgacatgatttatttgcgggccagcagcagccccagcaccagcccgacggtggcaccgatgcctacgctgtgccagggtttatcccgcacgtagtcgtcggtgcggtgcaccgcttctttggcgcgcgcatagtaggattcgccggtgttcgcccagcgcgccttgacctcactcagcgcctgctcggcgtgcgacttgatgtcaatgtaggcctgatccgcgcgatcgccggtgtattgcaacacttcttccagcgtctcggtcagcattctcagatcgtcatccagcgtagtttgctcagcatccgaatgtcttgccatagtgagatctccgtggttgaaaaattaagcgttcctacactatagacaaggatcgtcgcctgcggccatcggacttttaccctaaaacaccaattgcaccttggcggcctggcgcttgtcgccggcaaactccagcgcctgcgccagttggtccccggcgaattccgccgacaacagcggcagcggatcgaccacatcgccagccagccaggccaccgccagcgcgaattccgccacgaagcgaaacgatccgagcaggttcaactctttggcgatcaacaacatcagcgggaaatcagggaagctgccgcccatgccgacctgcaccacggtgcctgtggcgcgggtgatctccagacagcgctgcagcgacagcggatgtcccgccacttcgaaggcgacatcgaaatagcccttgtcctgctgatagtcgctaaaatcgtcgtccgcggcatgcaggcaccgattggcccccatttggctggcgatcgccaggcagcgcggactgagatcggcgcagacaatctcggcggcgcccagcgctttcagcgccgccaccagcagacagccgatcgggccgacgccggacacgaagaccttttttcccgtcacgtcaccgggctgcttcgccgcgtggacagccaccgccagcggttcggcgaacaccatcaccctgtcgtcgcgatcggcggcgtaaggaatgcactgcgcgctatccaccactttgtattgggtaaaagcgccgtcgacgtgcggaaaatacatcgcgctgccgaaaaagcgcatctcgacgcattgattgctttgctgctccagacagtatttgcactgcccgcagggtttgctgggattgagcgccaccttctgcccggccggcaactgtggcgaatcgctggcgaccacctcaccgatcacctcatggcccagcaccatcggctgacgcacctgaaaattgccgaccttgccttcctggaagtaatgcagatccgagccgcagatgccgccgcggctgattttcaccagcgttccctgccctcgataatccacttcttgcgcgatcaccgccacgtctcgcttgccgttgaccacacaggactgagtttgaattttcatcgcaagactccacggaaaaagattacaccgccgccgacatgccgccatcgacaaacagcagttgcccgttgacgaaggcggaggcgtcggcagccaggaacaccgccgcgccgatcagctcctgcggatcgccccagcgcgcggcgggcgtgcgttgggtcagccaggcggtgaaggccggatcgtcggccagcgcctgcgtcatctcggttttgaagtagccgggggcaatgccgttgacctgaatgttgtagcgcgccagctccacgcacatgccgcgcgtgagcattttcaccgcccctttggacgccgcataaggggtgatggtgtcgcggcccagctcactttgcatcgagccgatgttgactatcttgccgcgccggcgcggcaccatgtaacgcgccacggtctgcgacacgatgaagaccgccttctggttgacggcaatgatgtcgtcccagtcttgctccggaaactcggtgaacgggtggcggcgctggatgccggcgttgttgatcaaaacgtctatcgcgccgatgtccgcttcgatacgggcgatggcggcatgcaccgcctgagaatcggtgacatcgaacgccgccgcctcggcgctcagcccctcttcgcgcaaacgttcggcggcgtgcagggcatgttcttcggtggtggcgttgaccagaatatgcgcgccttgctgcgccaagccgcgtgccagcagaaaaccgatgccgcgcgaggcgccggtgatcaagacggtcttgttatccagtgaaaacagattgttcatagtgattcccggccatcaggcctccaatcggacaggcttctatctcagccgattgttaccggtaaaaacgtgatggaaatcactgaaaatcatgttacgaaaccctgttacccttaacgtgatctcacgcaggcagtcagcgggtaaaacttatctatctgattgaaaaacggctattttcaatagaagtacattcattgttatcgctaaatcgatgggttaacatgccgctatcccccttaccgcgccgcccgtgaaggccaccgaatgaaacacctccgcgttacgcgacaggacatcgcacaatgggccggcgtaacccaaactccgggtaaccaaacgctggtggtgaactgccgtctctcactcggcggcaccgtttgagccggcattcgggctaatcggcggcgtagcgcgggctttttcgctgcgcgccgcccaccacagaccgctgtttttcatcgcatagccgaatagcaggcccaccagcagggaaagcgtcaccagcggccaatcgccgccgccggcgaaggtcgcacaggcgccgataaaggtgccgggcacgaaccccagccactgctgtttggcctgaatgcacatcaggaacgccacgacgccggtcagtagataccccagcagattccactgcggcgccagttcgctgccgtggatgatcgccattgcccagaagacgccgctgcagcaggtcaacgcgccgatcaacagccctttcagcccgccctgcgggcaggcgaaatacgccgtgcagccgagaaaaccggcccaaccgatcagccccaggctgacggcaacccagccccaaacgccggagaggatcccggtagtaacggcaatggcgaaaagaacgttcataaagtgacctgcggcaaaaataaagcgcgcagtttacccgaagcgagtgattttttcgtaattaaaatcacaataaaaatgcaaacaaagaaatggaaatatcaaaaaagcaatgtttatcacaaaaaaagccagcgtgacgagcacgctggaataacacaacaccagggaaatcacgatctcaaatgaaatgcctacatgcgacgcctgtcgcccccctcccgaacgccggtttcagcgtgggaagcccgcacgcgttaccatgacgctcaacatcaaacaaatcacggcgctgctcaggaataacaagtgggtcgccaaatgcaaatcggcgtggtcgatcacaacgcccaacaggatcggcacccagttagcgatatacgcgatcacgtaaaacagggagatcaaacgcgcatggctggctttcggtgaaatcagattcaccagcgtggcgctgccgacgaagatcgcgccataggcgtaaccggcgatcaccatgcctgcggcggccagcgccagcgaatggatctgaatcgccacggcgaacaccccgaccgacaaagcctgagccaggcagccgaacatcagcgaatggcgggcgttgatgcgacgactcaaaatctggctgatgccggcaatcaccagatagacggcgaccacatagccaaagacgccacggctctgcatatccaacagtttttcggcgacgctcggccctatcgccagaatgctggcggcaaccgcccaacaaatgaacaatgccccggcgcacaggaagaatttaccgccggtcgcgcgcaggccatccgccagagagcttttcgccaccggcgcgttatccgccgctgcgctatcggcctgcgccgtcaccgcctctcgcggccagcgcagcatcacgcccagtgcggcgacggcggcaatggccatgatgatgatgaacggcaatgacgtggtatgaaaaccggtttgcagtgcgacgccgctaaagatcgggcccagggccaatccggtggtaaaggacagcgtcgcgatcaacgccgcattttttccgccgtcctgcggcccgaaacgcaccaacgcgatattcgccgcaccggtcagggcgccggtgccgacgccggccagcagccgtgccataaacatcatgaagaacgacgacgccaccgaaaacagcagcgcgccaagcaacaccaccaacagcgccggcacgatcatgctgcgcaggtcttttactttccccgccatattgcctacgccgaacagcgaaatcagcacgccggcggcataagcgccgtagatgatcgtcaggctgaccgagctcaacgccagctcatgttgataaagcggataaagtggcgtcggcgcgctgctgttcaacagcgctgacatcaatgccaacgccagaaacagcaagatagcgaaatgcgatgtacccgccttcgctttagccgtttcttcaacggcgatactttctgacatgttcaactcccgaatcgatcaggcattcgccctaaataaatgcgtcttcccgcatgccacgcggcttcaggaagcgcgcttatcatagcgttgggctatcacgcccaaaatagccaagaatgcatcatcgtgattcattaatgcagcatcgcagcgtcaggcatgcatttctgcagcatgcgatgccgccaagcgatggcgcaaccgcccaatgccacgccatacactgcatggttggccaggctggcgatcagcaaagccggatttttgccggccattccccaaagccccaaccccaccgagggataaatgaagcacagcgagatcagcgaacaggccaggccatacgtcagcgccccaacgagcaggccgccccccgacttaacgcgcgggcagatcaggcaatagaacgggatcgccaggctaatgccggcaaaatagtgcgcgccgtagcccatcatcagagcctctggcacatcgggaatgtcgccaggccgcaaaaaccaaaattgcccctgcagccattgattcatcagtttgccgatgaaggccaggttgagcttgccgatgagaccgacgctggaggcgacactgttcaccccatccatcgtcagcgtcgccactatgccaaacaagaccgccatcgccatggcgccaaccggacgcatgttcattgtttcgttccttatcacgttatgccaccgccgcctgctcggacttggccgaagcacgcttgcgcaccgccaacgcgccggacaacacgatcagcgccataccggcggcggcgatataagacagccgctcgccaaatatcagatagccaagcagcgtagagaaaataatggtgctgtaagagagaatgctgacaatcaccgcattgccacccccgtaggcgcgagtcatggcgatctgccccagactgccgaagacgccaatggcgcagacgcacagcagcattgcgccgtccagcaaggaaaagcccagcaacgcagtcatcaggccgccaaccagcgttcccaccagcgagaaatagaacaccacgcgcagttccggctcaccgcgtcgcaccagcttgccgacgttaaagtaagccagcgcggttaacaaaccggccgccagcccgaccagcgtggcaacgtactccccgttgggggcgtcggggcgcagcaagaccaaaatgccggcaaagcccaacagcacggaaaacaacagccgaccggtcagctgccctcgggtcgtgatgaacacgatcgccgactgaaagagggggttggtataacccaacgtggtggcggtggcgatcggcagatgtatcagcgaataaaaaccgcagtacatcgccgcattgcctatcgccgcccgcttcatatgcaatccgagatgacgggtgcgaaaaccgaggcgctggatcttgatcagcgccgcgacgatcagcacattgatgagagaacgataaaaaatgatgtcgaaaaatccgaccgtcgtcgacgccaacttgatgcaagcacccatcagcgcaaagaatccgctggcgacgaccatccacaaagctaccatgatcttctcttattaacggcctttggacagggccgtatcaacactacccggcggctttcaccgtcaacggtttatcgtccgcgcaagcgaagaacaccagcatttcggcaccttgctcgccggaaacgccctgatgcacgatatccacggtatcggtaaacgaatccccctgccggaacgtgcggcgttcaccggttttcctcacggtgagcgaaacgctgccgccgctcatgtacactgcgctgatgcaaggatgcgtatgccaggccagtaccttgttcggctctaccgtcaccttcagcatggtgatctgcggcgcgcctgcgggatactgacgatatgccgagccctcccatgcgctgtcggtcttgagcaacgtcgttttgacgatgccttcgccatgcccctcggcagcctgaaccggcccctgaaatactgccaacaatgccaaaatgccccacttaaccatcttatcgctccctgactgccgcgagtaaaaatgccaggcgccgcgcgcggtgaacctggcgagttgaaaaaacagcgttgtgctacagtcctttgatgcgctgctcgtattctgcgatgctctcggcgtagtagcggttaggcgccgcaaagttgcccaccatcacttcgatgaggtacggccccggatgtttcgctgcggcgccgagggcctcgtccagatcctccagcgtctccgccttcgcggaggcgacccccaggctgttggcaaacgctttccagtcatggttgggcaaggcggtatagtcggcggaaatgccgcgattttgcagcgtgtcgatgtgcatggcgccgtgcgcgctgttgttcatcaccacgaacaccaccttcacgccataacgcgcggcggtctgaatttcgatgccgtgcatcagcatgcaaccgtcgccggtgaccacgaggcaatcccgctgcggtgccgccagcttgatgccgatgcccgcgcaaatggcccaccccatcggcgccagggagctggaggtgtgataatccccccgcccggccgccagccagtgatgcgccatgaaaatgcggtgtgcgcccgaatcgaccacgacgttggtatccggattcatgcggctgcgaatgtgtttaatcgcatcgccgggatacagccggctttcgccctgggcgatgcgcgcctgcaacgtcggctgcggctgttccagcggcagtgcgcgaaccccttccaaccaggcgtcacgcaggtgagccgcgtcgccaagccgcgcgtcctcatcgccaaccgcggccaacaaacagtgcaacgtaccgctcaggctggaaaatatctgcagatccggctggtaatgcgagctcactttgtcgaagtcttcgtcgatcgccaccagcgttttattgccgtgcagtctcgggttccagttcagactgtcgcgctggctgagatcgcagcccagcaccagcagcacgtcgacgccttcaccgttgagggtttctaccgcgcgggcatggccggcaaaaccgtagacccctaatgccagggcgtgcccttcgggaaacgcgcccttgccggacaacgtcgtggcgacaggcaagcggtatttttccgctacccgcaacaacagcgcggcatcctgtggattgttcatccggttgcctaccaggcaggcgacgttgaggccgcgcagcagataatcatgcaacagctgttccaccgcttgcacatccacggccgcttcacggtgctgcggcactcgctcaggctggtcgcgacgatcgccgaacgcggttttcttctgcatgtcgaccggcacgctcagataggcgcgccctttccgctgtgggttcaggctggagaggctgcggcgcagctcatgctgcaaggtcaggttgtttttcgtttctatcgcggcgcaaagcaacggtttgacgatggtcagctcatcgatgccgctgttgctgccgtcctgaaaagcgccctgcgcctcatgataggtggcgatgctgccggccaggtacagcacggggatcttatcggcttgcgcggcggccatcgccggcaggaaattcatggtgccgggacctgaaatgcccaaacagacgccaaactttcggctggcgcgggcatagccatcggccataaatccgcatgcggtttcatgggcaccgacgatgccgacaatctcggaacggtcaatagaagtgattaacggataaaccagtttgccagggaccaaaaagatatgttgaatgccgcgcgctgcaaggccttgaataatgacatcggcgttgttgcgttccatcttctcggcgcctggcgccacggtaactctgactccgtcctccgtcgccaacgcaacgggggggcacagcatctctgcgtgagactccatttttttatatccagtcatatcatcgtgagctaacttgattcagagtcgatcccacttggcggtcgcccagaaataacgggaaccggctcttattcgtattgcttatgcattagggtggccttggtgtaaaatgtgcgtcgggtcgcagcataagcgccgataagaataagcattaccagacaaaaataaaggtgcaaaaccgcttcacggtgatgcatttatacatatcctgaaacattataaataatgatgatacgaagcatttttttcggtctccacaccagaataaacaccgcatcacaccgcttccttccccctcccgccagtctgtacagaggaggtgtgcaatgaactgggacgacgcccgattttttctcgccgttgcgcgctgcggcacgctacgcaaagccgccagccagctgcatgtcgatcaggcgaccgtcggccgacggctctccgctttcgaagatgcgctcggctccaagctgtttatccgcacgccgaaatccttcgccctcagcccgctgggggaggaaatgctggcggacgtgatgaagatggaaaatgcggtgcaggcgatcaaccgtaaagccgccagcggtgacgaaagcctgtgcggcaacgtgcgcatcgccaccaccgataccctggccgaagccttcgtgatgcctgcgctgcaagatctgcgggaacgctatccggccatcaccgtcacgctgctgacggcggtcaacatcgccgatatttcttaccacggcgcagatctggcgatccgcggcgcccgtcccgatgacgatgagctgatcatcaaacggttagccaccatcgaaatgggcctgtatgccactcagcactatttggcgcggcgcggcatgccggtcaagggcgaacagttgcgcggccacgatctgctgatgttcccgcgcgagctggtgccgcgccactggaacaatttctgcggcgaggccctgcacgagcccaacgtcgtgctgcaatgcaattcgcagctgctgctgcgttccgccacccgcagcgggctgggcatcggcctgctctccgcttttttggcggacaaagacccggaactggtgcgtctgttcccggagaacaaagactgggtggatatctggctggtgctgcatcccgatttgcaacgcgccgcccgcgtgcgcgcggtagtgcaggcgctggaaacgtcgtttagcgcccattacggctgagtgccgtttcgcccataaaaaaaggccgccgaagcgacctttttaccgtctgaagcgttatcagaacgtcggctgcgccatctgcaccagcgaaatcagcggctgcggataaacccccaacagcagcaccagcgcggcggagatcagcaccacgacgccaccggcggtcaacgcccagttgttcggggtgtcgcgctgcagcgattccggcgcgctgaggaacaggctgacggtcacgcgcaggtagtagtacagaccgatggcgctgcctaccacgactgcgccggtcagccaccacaggtgtgcgctgacgcccatcgcgatcacgaagaacttaccgataaagcccagcgtcatcgggatacctgccagcgacagcatcatcaccgtcatcaccgcggacaagattggcttgtgccagaacagaccacggtaagagaacagcgaatccgcatccgggccgcggtatgggctggacatcaggctgaccacgccgaaggcgcccaggctgctgaacaggtaaccggccagataaacgccggcggtttccagcgacagctgatgggtttgcaccgcaatcagcgccaccagcaggtagcccaggtgagcgatcgacgagtagcccagcagacgcttgatgttggtctggctgatagccatcaggttaccgaacaagatggagcagaacgcgatgatcgacaacaccatgcgcagcgcttcgttgtcggcggccggggcatacaggaacagacgcatcacgaccgcgaagatcgcgatcttgctggcggtcgccaggaaggtcgagaccggcgcaggcgcgccctgatacacgtccggcgtccacagttggaacggcaccagcgacagcttgaagcccagaccgacgatcatcatgcccatgccggccaggatcagcggctggtgcatcatgttttcctgcaggctcttgccgaggccggccagcgacagatcgccggattcggcgtacagcagcgccatgccgaacagcaggaacgacgacgcggcggcggacagcagcatgtacttgatggcggcttccagcgggcgcttctggcggtaggcatagcccaccaggccgaacagcggcagcgagataagctcgataccgatgaacagcgaagccagatggttggcgctcgccagcaggatgccgcccagggcggcgatcagcaccagcaggtagaactcttcgcggttatccggatagccgaccagccacggataggcgaaggtgcaggtcgccagactcgccagcagcaccagcccggtgtagaacatcgagtagccgtcaacccgcagcagcggggtgacgtccattgggcctgcctggccgacaaagtacagcgaaagcagcgccaggttgagaccgatcacggtcagggtggcgttgataaagtggtcgcgtcgccacgcaatgcctagcatcacaaccaccaccgtcaatccgacgatcaacagcggcagcagtgcgatcagttgttgaggagttattgtcatggcgaattacggccttgttgttgaaattgctgaaactgacgaaccaaaccagtgttgcacgttgctcatcgccgcgttggaagtatccagaatcggctgcgggtaaacccccagcagaaccagcaacaccaccagcagcagaatgatgaacagttcgcgcgcggtcatgccctgcagcggctggtctgacttaggcgcaccgtagtaagcgcgctgcatcatgatcagcgagtaaaccgaagcgaacaccagaccgaaggtggagatcacggtgatcaccggcaccacctggtagctgccgaacagaatcatgaattcgccgacgaagttaccggtacccggcatccccagcgtagccacggcgaagaacagcgacagcgcagggatgaacttgatacgcccccacaggccgcccatctgacgcatgtcgcgggtgtgcagacgttcatacagctggccgcagatgataaacataccggcggcagacagaccgtgcgcgatcatctggatcacggcgccctggtaagccagctggctgccggtgtagatggcgatcagcacgaagcccatgtgcgagaccgaggtgtaagcgataagacgcttgatgtcggtctgcgcgaacgccatccaggcgccgtagaagataccgaccacgcccagccacatggcgattggggcgaactcgtgtgaagcctcagggaacagcggcagactgaaacgcagcaggccgtaggccgcggttttcagcaaaatgcccgccaggtcgacggaacctgcggtcggcgcctggctgtgcgcgtccggcaaccagccgtgcagcggcaccaccggcattttcaccgcgaaggcgatgaagaagcccagcatcagcagatattgcacgttgtgggacatcggcgtttgcagcaggtcttcgtaatcgaaggtccacacgccggtggcgttgtagtgcacgaacaccaggcccaggatcgcaatcagcatcaccagaccgctggcctgggtgtagatgaagaacttggtcgccgcggtgatgcgggttttaccgtccgacgccttgtggccccacagcgcgatcaggaagtacatcggcaccaacatcatttcccagaagaagaagaacaggaacatgtcgatggcgaggaacacgccgataacgccgcccaggatccacagcaggttgaggtggaagaagccctgatacttctggatttcacgccaggaacagaggatcgccagcacgcccagcagaccggtcaacaccaccatcagcagcgacagaccgtccagcgccaggtggatggagatgccgaagcgcgggatccacggcagcaggaattcgctctgccactgcggaatgcctttcggcgtggtcaatgtatagccgccctgcatccacagctgcagagagagcgccaacgtcagccccattgcgatcagcgctatccagcgcggcaccttagtaccgaagcgctcaagctgccagcacagcagaccgccgataaaggggataagaattagccaaggtaatagcatggcgttttgtgtcccttatacgaataatttcaaactttgtacgtagcgcctgcccggcgctacgcccgaaaaatgcgtctgtttaaattattcaattaaaccagaatcaacagagccaatacgaccactgcacccacacccatagacgctatataccaacgcacctggccgttctcgctcaccgtcagaccgcggttcccccagcgggagaagacggccggcaggttcatcagcgagttcagcggatcgcgttgcagcagcttcgcaatgcccagatacggcttgacgaatactttgtcatacagccagtcgaagccccaggcatggaaccaccaggtcgagaagaaacgccccggtgcgctgttggcgatgctgttgaccaggctgcgtttgcccagccacagcgcggccgccagcagaatgccgacgatagccaccacgccggaggtgatttccagcgtcagtacgctgccgtgcgccagctcggtcgtctccggcagcacgccctgcaacggcggcacgatcatcgcgccgacgaaggtggacagcaccagcagaaccagcagcggcaggtggtgagtgatgcctttaccggcatgcgctttgattttctcttcgccatggaacacgatgaaaatcatacggaaggtgtacagcgaggtcatgaacgcaccgaccaggccggcaaccatcaggttgatgtggccgttggccatcgcgcccgccaggatctcgtccttactgaagaagccggccgtgaccagcggcaacgcagacagcgccgcgccgcccaccaggaagcagacgtacaccagcggaatgctcttgcgcaggccgcccatcttgaagatgttttgctcgtggtggcaggccaggatcaccgaaccggacgacaggaacagcagcgccttgaagaacgcgtgagtcatcaggtggaagatcgccgcgtcccatgcctgcacgcccagcgccaggaacatgtaaccgatctggctcatggtagagtaagcgagcacgcgcttgatgtcggtctgcaccagcgcggcgaagccggccagcagcagagtgaccgcaccgacgatgcccaccagatgcagcacttccggcgccatcaggaacaggccgtgcgtgcgggcgatcaggtagacgcctgcggtcaccatggtcgccgcgtggatcagtgcggaaaccggggttgggcccgccatcgcgtccgccagccaggtttgcaacggcagctgcgccgatttaccgaccgcgccgcccagcagcatcagcgtcgcccaggtgatggccgtatcgcccaccgccagtttctgcggcgccaggatcatcagctcgcggatgttcagcgtgcccagctcgttgtagaggatgaacagcgcgaacgccaggaacacgtcgcccacgcgggtgacgataaaggctttcatcgccgccgcgccgttggccggatctttgtagtagaagccgatcaacaggtagctgcacaggcccacgccttcccaacccagatacatcagcagcaggttgtccgccagcaccaagaccaccatgctggcgataaacaggttggtgtaggcgaagaagcgcgaatagccctcttcaccgcgcatgtaccaggaagcgaacatgtggatgaagaagccgacgccggtgaccaccgacagcatggtcagcgacaggccgtccagcaccagagtcacgccgatattgaagttgccgacggccatccaggtccacaggctttgctcgaacagctgcacgccggcggctttctgggcgaagaaatccatcgccacatacaccgtgaccagcgcagccaggccgatagagcccacgccgacggttgccgccgtgttctcagaccagcgaccgcgggaaaatgccaacagcaggaacccgatcagcggtagcagaattgttaaatataataggttcatccgcgcatctcactgacagtatcaatattcagggtatgacgacgacggtagagctgcagcagcagcgccaggccgatactggcctcggctgccgccaggctgatcgccaggatgtacatcacctgcccgtccgcctggccccagtagcttcccgccacgataaacgccaacgccgcagcgttgatcatcacttccaggctgatcagcataaacagcaggttgcggcgcaccagcagcccggtcaacccgagcacaaacaggatagccgccaggatcaggccgtgttgaagagggatcatgcttgctcctccgattttcttctcgccatttcgccacccaccggcgcgttgctcagcacctcgccaggcttgtgctcgcggccgatatggaaggcgacaaccagccccgccaacagcagcattgaagccagctcaaccgccagtacgtaaggcccgaacaggctgatgcccaccgccttcgcgtcgaccatctcaccgctgatgccctgatcggatacgctgcggatcgcaacgatcaataccaccagcagcgccagtgacagcaggccaggcccgatccacaccgtcggcttcatccagtcgcgctcttgctgctgcacgttgccgaggttcagcatcatcaccacgaacacgaacagcaccatgatggcgcccgcataaacgatgatttccaatgcggcggcaaagtaggcgccgagagagaagaagactgccgagatcgccaataacgagacgatcagatacagcagcgcatgcacagggttggtatgggtgatcacgcgaatcgtcgcggccaccgcaatcaaacctgccagataaaatgcaatttccatgcttgctggctccttagggcaacagacctttgacgtcgatcggtttggcttcgttttcggcttcgcctttggctttgccgtcaatcgccataccggccatccggtagaagttatattccggatatttacccggccccgagatcaacagatcttctttttcgtacaccagatcctgacgcttgtactcgcccagttcgaaatccggcgtcagctggatagcggtagtcgggcaagcctcttcgcacaggccgcagaagatgcagcgcgagaagttgatgcggaagaactccggataccaacggccgtctttctgttctgccttttgcagcgagatacagccgaccgggcaggcaaccgcacacaggttacaggcgacgcagcgctcttcgccgtccggatcgcgcgtcagcacgatgcggccgcggtagcgtggcggcaggtacaccggttcttccggatacatctgggtttcgcgcttggcgaaggcatgcatgccaatcatccaaatgctgcgcatctgggtgccgaaaccaaccactaactctttcaatgtcatggtttattcaccccttattgagcgttgtacaaaatgaccgcggcggttgccagcaggttcagcagcgtcagcggcaggcacactttccagccgaaggacatcacctggtcataacgcggacgcggcagcgcggcgcggatcaggatgaacatcatcatgaagaaggccgttttcaacgcgaaccagatgaatggcggcaggaacggaccctgccagccgccgaagaacaacgtcacaatcagggcggacacggtgacgataccgatgtattcccccacgaagaacagaccgaacttcatgccggaatattcgatgtggtaaccgtcggccagttcctgctcggcttccggctggtcaaacgggtgacggtgacacaccgccacgccggcgatcgcgaaggtcacgaagccgaagaactgcggaatgacgttccagacgtgcgcctgagattcaacgatggcctgcatgttgaacgaatccgcctgcatcaccacgcccatcagcgacaggccgatgaacacttcgtagctcagggtttgcgcggaggcgcgcatcgcgcccaacagcgagtatttgttgttgctcgaccagccggcgaacagcacggcgtacactgccaggccggccatcatcaggaagaacagaataccgatgttgagatcggacaccgcccaggtcgggctgaccggcacgatggcaaatgccagcaacagggaagtaaaggcgatcatcggcgccagggtgaagatcacccggtcggagaatctcggcacccagtcttccttgaagaacattttgatcatgtcggcgaccagctgcagcgagccgccccagcctacgcggttcggtccgtagcggttctggaacaggccgagcaggcggcgttcgccgaagctcatgaacgccccgcacgccacgaccaccaacaggatcacgaccgctttaagaatggcgatcaagatgtcgatcacctcaggggtaaaccagctcatcgtgccgcctcccgcagattgtctaccttagcacccaccaagatcggcgggatccctggcaagccgagcggcaaaccaacctggccctgggtcagggtttcactcagacgcaccggcagacgcagagtctggcccgcgcagctgaactccaccaggctgcccgcattaacgccaagcgtcgccgcatcggccgggttgaccatcacgtaggcttccggcatacgctgctggatcacgtgagagcgctgcgacatttcatcgctgccgaacaggtggtagtaaggcgcgacacgccagccgtcgaccggattgaacgcggcaggcacgcggtcgaagtaaccgaggctgccctcccccgcttcgatcaggcgcacgcccggatcgccgtggcgcagtttgccgcccacttcggcctggaacttgttccatgcctgcggtgagttccagcctggcgcccaggcgaacgggatctgctgacgatcggccagcgggctgttgttcccttccatcgagaaggcgaacatggtgtctttatcctgcggctgacgcggctcgtgcacgctgatgttggcgcgcatggcggtacggccgctggaacggtgcggcgaacgcgccagcttctgaccgcgaatgcggaacgtcgcgtccggcgcggcatcgacaatgccctgcaactgcggcaacgcggcgacgcaagcggcgatcacgtcatcgagctgggtccagtccacgtggcggctggtgtaggtggagtgcagcgagtgcatccagcgccagctttccagcatcacggtgaactgattcttcttggcgtcgtcgtaataagccggatcgtatacctggaagaagcgctgcgcgcggccttcctggttgatcagcgtaccgtcgctctcggcgaaactggccgaggagaggatcagattggctttgtccatgatcgcggtgcgctggtggtcggcgacgatcaggttattgaccttggccaacgccgcgtccacttgcgccgccggcgcatggcgatagagatcgttttccatcacgatggcggtgtcggctgcgccgctcgccagctgttccagcgcctgatcgagcgaaccgccgccgatcatcgccaggcccatgctgttggctgcgcccgccacgaaggtgatgccgacatcggaaccgcggcccttcaacgctttggcgatgttggccgccgcttcgatgatggcttcgctgccggcgttgctgccggtcacgatcagcggtttgcgtgcgccggtcagcgcctgcacgatgatatcgactttcttgttcaggccttcagccagatcgttcaccgccggcgctgcgctatccagcgcgtgagcgatggcgaagccgaagcgcgcctgctcgtctaccggcgcgcggtagttccaggcggcgatgtcatccagacgggtgttatcgacgttggtggtgaacaacggatacttggcgtgttggccgatattctgcaccgccgcgatctgccagtcggccacgcgttgcgccgccgccatcgcgcgggctttacccttgacggcctgacgcacggacagcgcgatgcgcgcgccggtttgcgtcaggtcttcgcccaacaccagcaccgcgtcgtaatcttcgatctcacgcagcgccggcgtatgaacgccgccgttcttcagcacgttcagcatcagcgccagacgtgattgttccgcctgagcgataccggtgtagtagttctctgcgccaaccagctcgcgcagcgcgaagttgctttccaggctggcgcgcggggagccgatgccgatggttttcttcgcctgacgcaggatgtccgccgcgccctgcatcgcctgctcggcgttcagggtgatccagtcgtcgccgcgcagctgctgcggttgacgcggacgatctttctggttgacgtagccgtaaccgaaacggccgcggtcgcacaggaagtagtggttcacgctgccgttgtaacggttttcgatacggcgcagctcaccatagcgctcgcccgggctggtgttacagccgatgctgcactgctggcaaatgctcggcgcgaactgcatgtcccatttacggttgtaacgctcggagtgcgttttgtcggtgaagacgccggtcgggcacacttccaccaggttgccggagaactcgctttccagcgtgccgctttccgggcgaccgaagtagacgttgtcgtgcgcgccgtacacgccgaagtcggtgccgtccgcatagtctttgtagtaacgcacgcagcgatagcaggcgatgcagcggttcatctcgtgcgagataaacggccccagttcctggttgttgtgggtgcgcttggtgaagcggtagcgacggaagctgtggccggtcattaccgtcatatcctgcaggtgacagttaccgccttcctcacacaccgggcaatcgtgcgggtggttggtcatcaaccactcaaccacgctttcacggaactgcttcgcttcgccgtcatcgatggagatgaaggtgccatcggatgccggggtcatacaggacatcaccaaacggccgcgcgtatcttccgcgttttggtattgctttaccgcacattggcggcaagcgccgacgcttcccagcgccggatgccagcaaaagtaaggaatatcaaggccgagggagagacaagcctgcagcaggttgtccgccccgtctacctcatactctttgccgtctacatgaatcgtagccatagtcagcatgcttccaagtggcctgccttgcggcaggcgttaatcaaaaattctggccgtgttcgggcgaattcggcttaccagcgctgcttcagcagattgttcggctgaatgccgccaatcgcatgggcgttgccgaagtgctgcacggcgatacccgcctcgaactcttcacggaaatatttaatcgcgctttgcagtggctctacggcacctggcgcgtgggcgcagaaggttttgcccgggccgagggaacggcacagctgttcgagggtttcaatatcccccggctgcccttcgccgttttccaacgcacgcaggatcttcacgctccacggcaggccgtcgcggcatggcgtacaccagccgcaggactcgcgggcgaagaactcttccaggttgcgcaccagcggcaccatgccgatttcgtggtctaccgccatcgccagcgcggtgccgagacggctgccggctttaccgatcgcgccgtattccatcggcagatcgagatgatcggcggtcaggaagtcggtgcccgcgccgcccggctgccaggctttgaaacgcagaccgtcgcgcatgccgccggcgtagtcttccaggatctcgcgcgcggtggtgccaaacggcagctcccagacgcccggatttttcacccggccggagaagcccatcagcttggtgcctttgtcttcactgccggagatgccggtgtaccactccacgccgttcgccaaaatggccggcacgttgcacagcgtttcgacgttgttgacgcaggtcggcttgccccacacgccggcgctggccgggaatggcggcttggagcgcgggttggcgcggcggccttccagcgagttgatcagcgcggtttcttcgccgcagatgtaacggccggcgccggtgtgcacgatcagctcgaaatcaaatccggtgccgagaatgttcttgcccagatagccggcttcggtggcttccgcgatggcgcgacgcaggtgcgccgccgcttcgatgtactcaccgcgcaggaagatgtacccgcggtaggctttcagcgcgaacgcggagatcagcatgccttccaccagcaggtgcggcaactgctccatcagcaggcggtctttataggtgcccggctccatctcatcggcgttacacagcaggtaacggatgttcatggattcgtccttcggcatcaggctccacttcaaaccggtggagaagcccgcgccgccgcggcccttcagcccggaatctttcaccaggccgacgatctcgtccggggccaggcctttgagggccttctctgcgccggcatagccgtttttgctgcggtattcgtccagccacagcggctgcttgtcatcgcgcagacgccaggtcagcggatgcgtttcgggagtgcgtacaatgtgcttggtcattggtactgctccagtagcgtctcgatatcttcaggcttcagctgactgtgcgtgtcgtcatcaatcatcatggtcggccctttatcgcagttgcccagacagcaggtcggcaacagcgtgaagcggccatcaaaggtggtttgacccggcttgatgttcagcttcttctcgatagcggcctgaatgccttggtaaccggtgatgtgacaaacaacgctgtcacaataacggatcacgtgacgtcctactggctgacggaaaatctggctgtagaacgtggccacgccttctacgtcgctggcggggatgcccagcacttccgcgatggcgtaaatcgcaccgtccggaacccagccgcgctgcttctgcacaattttcagtgcctcgatggaagcggcgcgcggatcctcgtaatggtgcttttcgtgctcgatcgcatcacgttcttccgcgctcagtacaaatgcatcaacgccgctctgaggagcggctgcgttgatgggctcgagcgcatcattgactgcgtgattgtctttttgatcatgcatagttagcggtccacatctgacattacaaaatcgatactacccagatagacgatcaggtcggaaaccaggctgccacggatgaccgatgggatctgctgcaggtgcgcaaagctcggcgtacgtacccgggtgcgatagctcatggtgctgccgtcgctggtcaggtagtagctgttgatccctttggtggcttcaatcatctggaatgattcgttggctggcatcaccgggccccaggaaacctgcaggaagtgggtgatcagcgtttcaatgtgctgcagcgtgcgctctttcggcggcggcgtagtcagcgggtgatcggccttgaacgggccttccggcatgttgttcaggcactgttcgaggatgcgcaggctctggcgcagctcttccaccttcagcatcacgcgggtgtagcagtcgctggtgccgtcgccgaccggcacttcgaagtcgaagttctcgtagccggagtacgggcgccatttacgcacgtcgaactcaacgccggtcgcgcgcaggccggcgccggtcacgccccactccagcgcttctttggcgttataagacgcgacgccgatggagcggcctttcaggatgctgttcttcagcgccgctttcacgtaggaatccagacgcttcggcatccagtcgaggaattcacgcagcaggcgatcccagccgcgcggcagatcgtgcgcgacgccgccgatgcggaaccaggccgggtgcatacggaagccggtgatcgcttccaccagatcgtagatcttctgacggtcggtaaaggcgaagaacaccggggtcatcgcgccgacgtcctgaatgaaggtggagatgtacagcaggtggctgttgatgcggaacagttcggacagcatcacgcggatggtgtcgacgcgctcaggcaccttgatgccggccagtttctcgaccgccagcacgtaaggcatttcgttcacgcagccgccgaggtactcgatgcggtcggtgtacggaatgtagctgtgccaggattgacgctcgcccatcttctcggcgccgcggtggtgatagccgatatccggcacgcagtcgacgatctcttcgccgtccagttgcagaatgatgcggaacgcaccgtgcgcggacgggtggttcgggccgaggttgaggaacatgaagtcttcgttctcggtgccgcgcttcatgccccagtcttccggcttgaaggtcagcgcttccatctccagatcttctttctgcttggtcagcacgaaaggatcgaattcggtggcgcgcgccgggtagtccttacgcagcgggtgcccttcccaggtctgcggcatcatgatgcgcgacaggtgcgggtggccgtcgaaggtgatgccgaacatttcccaggtttcgcgctcgtaccagttggcgttcgggaacaccttggtcgccgtcggcacgtgcaggtctttttcagacagcgccaccttcagcatgatgtcgcggttgcgttcgatggaaatcagatggtagaaaacggagaaatccgcagcgggcaggccgtcgcggtgggtgcgaagacgttcgtccacgccatgcagatcgaacagcatgacatacggcttcggctgttttctcaggaacgtcattacttccagtaactggtcaggtttaacccataccacgggcatgccggtgcgggtggcctgaacagtaaaggcttccggcccaaaacggttgcgcagttcgccgatcaccgggtcgtcaaggtgatctcgggtctgccaggcaggcaaggcgtcgtgcgtcgtcaaatctgtcataattttttttcaccacactaaagggttattcgccgcaagtttcacttttcgctgtgttaaccaatagcgcactaagatggacgttaaatgaacgtcttaaatctcgtcaggcgtccggaggttggtcaccgcgatgcgctcgccgtgtttacgctctctttcagactgcatattggcgcggtaaacgccctgatcgccgacaacccacgacagcgggcgacgttctttgccgatagattcctgcagcagcatcagcgcttgcatgtaagcttccggacgcggtgggcagccaggaatgtacacgtcgaccggcaggaacttgtccacgccctgcaccacggaatagatgtcgtacatgccgccggagttggcgcaggcgcccatcgagatcacccacttgggctccagcatctgctcgtacaggcgttggatgaccggggccatcttggtgaagcaggtgccggccaccaccatcaggtcagcctgacgcggggaggcgcgcaacacttccgcaccgaaacgcgccacatcgtgaacggcggtaaacgacgtcaccatctccacgtaacagcacgaaaggccgaagttatacggccaaatagagtttttacgcccccagttcaccatgtcatgcagcgcatgttcgagtttacccatgtaaaccgtgcggtggacctgttgttccaggggatcggcgacgatctcctgtttttgcaggggataacggtcgttctcaccgttcgggtctatgcgggtgagcgtatagtccatcttaatgcctcgctgttactgcggatgactgttggtgttagtgatcgtgcttggtttgctgcggcgttgggaacgcgccggagtccaatccaacgcgccgatgcgcaccagataaaccagaccggccaatagcaccaaaatgaaaatggcggcttcgataaagcccacccagccgctctcgcgaatcgagaccgaccaggcatacaggtataaggcttcaacgtcgaaaataacgaagaacatggccaccaggtagaacttggcggacaagcgcatgcgcgccgtgccgacggagtcgatacctgattcaaacggggtgtgtttggcgcgcgcccgggctctcccgcccaagaagaacgcacccagcagcattaagccgcaaagcccgatagccacgacgagaaatacggcgagcgcccagtgatgagcgataacttcagtggttgttgacatactctatgcttactcatcaaaagtggcgtcgatcgcactgctcttgtcaccggcagttagtgcgccacatcgatttaagggaaggataaataaccacacaaacaaactgcttttacagcgagttaggcagcgtttttctgtgggctttttactcctttctataaccttttgtcaactttgacaaaagtatctacacactagtttacatacgtatcatttgattaacatttgatgcgccagggacaggctaaatcgtgtcagttaatttttgtgtagaaacagatagatataaaccaacatgcacatttcagttttactataccattgtctcaggaattccctgttcttccactcactacctaggggtatttttttgatccaggacacgttttcagcataaatcctcaaaaaaagtgtggccctttaacaattttcctcaaattaagccgcaaaaacggccgccataagctaacaaaataaccctaacattaccatgcctttaactcattcaatcttattgttcaaaaaataaacccagcatcttaaacccggtcaaattctcttttcagcaacgcttaaaagttaataaaacagccaactcataacaaaatcgtcattaaatccctataacagtaaaaatcgccaaaaaacggccaaaaaaaacctccgccgaagcagaggtttttcatcagatatcacgccgcggcgttattcttcttcgtccaccaggctggcatcatcctgatcgccctggagaccggcttccgcgccgttgaagccatagccgtcattgccgccctgcatcgcgctgaagatggccattgccagttcgttgctgcactgcgcgtttttgcacagcgcatactgggtatccggcagcggcggcaaaccttccaccgcgcccagcacccgcagatcggggctcatcatctcgatcggccgcgcggtcacacccagaccggccttacaggccgcccgcaccgcagacagcgtggaggcgacgtaggcgatacgccacgggataccggcttcgtccaactgtttgatcgccagcgcgcggaacgggcttggttcatccatcaccaccagcgggataggttcgccggcctgatagtggtaatcggcagcgcagtaccacagcgtcggcgacgtgcgcagcacgatgtgcgggtgcccggccggatcggccgtggtcaccgccagatcgatctcaccctcttccagcagatcgaccatcgtcgtgctgcgctttacgcgcacgtcaatggccagcttcggatagatggcggtcacgcggttcaacaggaaaggcagaatggtatcggcggtgtcgtcggaagcgccgatggtcagaacacctttaatattgttgtacatcagcgaggtacaggcttcgtcgttaaagcgcaggatcttcctggcataaccgagaagctgaataccatgctcagtcaggagtttgttgcgcccatggcgggcaaacagttctttgccgaccagttgctctaatcgctgcatttgttggctgacggctgattgcgtacggcaaacggcaacagccgccgccgcgaaggtattcaaatcagcaaccgcaacaaaggttcttagcagatcgaggtcgagattaagtatcggacgatttgcagttgtcatagtgtattcttcacttttttaaattctaatttacgaactactaccctggtgtgtttctcagacgccgttgaaaaggacggagcctgttatgacagtaccccactcataagtggagggcaaaaaaattacttatgattcgttacctctatcgccttttaaaatgcgatctatcgatggtgcttatagaacgcgggggactgaataccggtggaaagggaaaacccccaccgaacctgagattttactcattgataccgcctaatttccactccattcgtgctactgagaatccttatcaaccggcgttcagactgcattacagagtaagaaaaataaataattaacggcaccaacttcgtgttatcactcaatgaatttaataaattcaatcagtaagatttttactttaaataataatcctataaccacataaacaatgcttaagctgaaatataaagtaaagctaatgtaaatatgccattttcttagtgtggtgcgctaaccggcaacccgctatcagacaactccggtattatcgttcctttacagtttattgaagcccattctcactttcggcttatcatttcactgctaccggccgcgatcgccggcacgtctcgtttatcgacacgcaatttaacagaacaaaaccctagtaaaattatagttcatgaaattatgaaccacaaaataactttacctttgcttatcataactaaaatccccctttacgacatgcatttgcaccaaaggcgtgcaaaacccttcaaaagcaactacgccaggagtacattgggcgggttgcggcgtcccacggtaggagcgcccctatcccagcaaaaggctcaactttttatgtcccccattgagaaatccagcaaactggacaacgtctgctatgacattcgcggcccggtgcttaaagaagctaaacgtcttgaagaagaaggcaacaaagtcctgaaactgaacatcggcaaccctgccccgttcggtttcgacgccccggacgaaatcctggtcgacgtgatccgcaatctgcccacggcgcaaggttactccgactccaagggcctcttctcggcgcgtaaagcgatcatgcagcactatcaggcgcgcaacatgcgtgacgtgaccgttgaggatatctacattggcaacggcgtctccgagctgatcgttcaatccatgcaggcgctgctcaacagcggcgacgaaatgctggtgccggcgccggactatccgctgtggaccgccgcggtctcgctgtccggcggcaaggccgtacattacctgtgcgatgagcaggccggctggttcccggatctggacgacatcatcagcaagatcaccccgcgcacccgcggcatcgtgatcatcaacccgaacaacccgaccggcgcggtgtacagtaaagcgctgctggagcagatcgtcgagatcgcccgccaacacaacctgatcatcttcgccgacgaaatctacgacaagatcctgtatgacgaagcggagcatcattcgatcgctgcgctggcgccggatctgttgaccgtcaccttcaacggcctgtcgaaaacctaccgcgtggcgggcttccgtcagggctggatggtgctgaacgggccgaagaagcacgccaaaggctatatcgaagggctggagatgctggcttcgatgcgcctgtgcgccaacgtgccgatgcagcacgccattcagaccgcgctgggcggttatcaaagcatcagcgaattcattcagcccggcggccgtctgtacgaacagcgcaaccgcacctgggaactgctcaacgacattccgggcgtctcatgcgtgaagccgcagggcgcgctgtatatgttcccgcgcatcgatgccaaacgcttcaatatccatgacgaccagaaactggtgctggatctgctgctgcaggaaaaagtgctgctggtgcaggggaccgcattcaactggccctacccggatcacgtgcgtatcgtcaccctgccgcgcgtagacgagctggaaatggcggtcggcaagctgggccgcttccttgaaggctaccatcagtaatcgcctggggcgcagcgccttgctgcgcccttctctcattgcccggttgcaaaattcgccgtcactgcttcacaatggggccctcacttgccgttaaagagagcaccatgagccagagccatttcttcgcccatctgtcccgcctgaaactgatcaaccgctggccactgatgcgcaacgtgcgtaccgagaacgtctccgaacacagtctgcaggtggcctttgtcgcccacgcattggcggtgatcaagaaccgcaaattcaacggcaacctcaacgccgatcgcgttgccctgctggcgatgtaccacgacgccagcgaagtgatcaccggcgacatgccgacgccgatcaagtactacaatccgcagatcgcccatgagtacaagaagatcgaaaagatcgcccagcaaaagctgctggacatgatccccgctgagctgcgcaacgatttccgcaccattctcgatgagcactactacagcgaagatgaaaagcaggtggtgaagcaggcggacgcactgtgcgcctatctgaaatgcctggaggagctgtctgccggcaacaacgaattcaccctggccaaggcgcggctggataaaaccctggagcagcgccgcagcccggaaatggactacttcatggaggtattcattcccagcttcagcctgtcattggacgaaatcagcctcgacagctcgctgtaaccccgccggcgcagcctcgctgcgccgttaaaaaccgtagagccacggcaccacaatcacgctgaccgccatcaccaacagggtgaacggcacgccgagccgcacgaaatcgccgaacttgtaattgcccggccccagcaccagcgtattgaccggtgaagagaccggcgtcataaaagcggcggacgcggcgacggcgataatcatcgcgaacgggtatggcgatacccccatttcgcgcgcggctgcaatggcgatcggcgccatcagcaccgccgtcgcggtgttggaaataaacaggccgatggtggcacacaagacgaacaggcacagcagcatcacgcgcggccccgcgccaccggcgacgtccatcagcccgctgacaatcagatccaccccgccggtcttttgcagcgcctgcgcgaacggcatcatgccgacaatcaaaataatgctcggccaatggatcgatttataggcgctctccatatcgatgcagcggaacttgcccatcagcaagcaggcgatcagcgccgcgattgggttggggatttcgtcggtcagcatcatcgccaccatcagcgccagacaaaacagcgcgtgcggcgcctgcgtgatggccggcgccacttcgtccacctcggccggcagattgagcacgataaagtcgtgggttttggcctgcagctgacgaatcgccttccagtcgccgatcaccagcaagatatctcccagctccagcggctcgtccaccaatttgccgcccagcgtctcgccgtggcggcggatgcccaccacgttcagatcgtagcggctgcggaacgccgcttcgcgcaggcttttacccagcagcgccgagtccgggatcagcgagacctccgccatgccgacgttgcgcgactgttccgagaagtaatcaccgcgcagcaccatcggctccagccgctgttcgccacagaattcgcgcagatcgacctggctgtccgacatgtcgatcaagaggacgtcgccctcgcgcagctcggtgctgccggaggcgctgaccatcacccgccggaagcgtttccagcgctcgatgcccaccacgttggcgccatagcgcgcacgcaggtgcagctcgtccagcgaacgcccgatcagcggcgaagcgctgcggacagccaaccgccgcgcacggccggtcagcttataatcgcggatcaggtcacggaaggtgcggcgctgccagtcgtcgccggctttgcccgtgtcactgctgcccagccaacggcgggcgatcagcatgtagccgacgcccagcgccagcaccgccaggccgatgggcgtcacgctgaagaaaccgaaaccatggatgccttcgcgcaccagttcgctgttgaccaccatgttgggcggcgtggccaccagcgtcatcatgccgctgataagcccggcgaaactgagcggcatcatcagccgccccggcgcgatcttcattctcgccgtcacgctgagcaccaccgggataaagatcgccaccacgccggtcgagctcataaatgcccccagcccggcgaccgtcaccatcagcagcatcaacattttggtttcgctgctgccggcgactttgaccagccagtcgcccacctgataagccacgccagtgcgcaccagcccttcgccgatcacgaacagcgcggcgatcaaaatcacgttgggatcgctgaaaccgaccgtcgcctcctgcaggctgagcgtgccgctcagcacgaaagcgatgatcaccaacagcgccaccacgtccatacgcagcttgttggtggtaaacagcacgatggcaatcagcagtaaactcagcacccacagtaattcgctgttcaaaacggcctcatccggcaaatgtccaaaggcctaaaaaatagcataaaaaaaccccgccgaggcggggtctaatcaattagggtgaagataatgccacttaggccagccggcgaacgatcgcgccctgcgccgttttatcgacggcgatctgcgccagcgaatccagccgcaggtcgacctgctccagcttcggcgcatcggccggggcgttgaccgcaatcacctggcaacccgccgccaggccggagagaatgccggccggtgcgtcttcgaccaccacgcactcgtgcggcgccagccccaagcgctcggcgcccagcagataggcgtcgggctgcggtttaccgtgtttaacctgctcggcggtgatgaacaccgccggctgcggcaagccgccggcctggcgacgggcgcccgccaccggcaccgaaccggaggtgacgatcgcccaagggatgccgagcgcgttcaggcgctccagcaatgcaatggcgcccggcagcgcgcgaacgccgtcggtatcctgcgcttccacctgctccagcaattggaattcacgctgaatttccgcttcgctttcgcccggcataaagtggcgcagagaagtaatggcctgtttaccgtgaatgaagtccagcaccgtttgcgggtcgacgccgcggcgctcggcccagtgcgtccaggcgcgctctaccgccggcagcgaatccaccagggtgccatcaagatcgaacagaaaacccttacactccacagaaaacctcttcttaatcaagcattgatgatttgcgctatctcaacggcgctcaaatgatactggcgcgggcaggcctgccaaatcgccagcatacgctgatatttttcccacattttggtctgggcgttaaaaccgtggctgccggaatcaaagtgagtatagcgcccctcggtgctaaccaggaaacgcacgtaactcaggtagcgcgcctcggtcgcggcatcgaaaccgagaaacgccaggcggcgctcgtccagatcctgcttctctttcaggttgccccaggaaacctgcagcgcatgatgcatctccatcacgttgatgatggtgcggcacacctcttcgctcagttcgccgaagtcgcgatccagctcgcgcatttgcaaaccgaagccgcgttcgacgatggtttgcaaccggcgataacgatcgccgttgtccggatcgagcagggtcatcatcttgtactgattcgacaggatcagccgctgggcgttggtcatttccatcaggatttcctcatttctgtgtgatggcgggagcatcgcacagcgcaagaacgcaggaaatcacaactcgaccgttctttgatttaaaccggggttattggcgctttgacgagaaaggccgcatcagcgcggccttttttcatttacagatcgtcgaggaaggttttgtccagctgcttgaaggcgcgcttgagcaaatcagccaacgtctgataggtcggcgtgccttcgagcggcgctaccgcctgcccggcttccgtcagcttgttgcgcacctcatggaaccattgcaacagcgtcggcggcagcggcgtaacagagcggcgccccagccaccacaagccctgcatcggcaggctgcaagcgaacagcgcggtggcgatcgccgggccgagctggccgccgagcgcgatctgccaggtcagcgtgaaaatcgccaacggcggcatgaaacgaatagcgaaacgggtggcacgcgcaacgcggttctccggaaagaccggtgccagacgtttgtctgacggccaggttttcatataatgctgcccgcgctggaagacctgaaaccagcttacggaaccggacggtttgctcgtcattgcgtacctcaacgtcacgtaaagaaactaaaagcgtgctgccagagaccatactaaaaaatttgaagctttaaatttattttgtgtttgcaccgggctatcggtatcctaagccggccttgtggccggtagaagatgacgtaaattttgtcaacttttagccctataaaaatcaagattatttaaaccgcagagaaatcatcggtttttccatcatcctgtgatttgtgcacttcacatgatgttaatcataaatgtcatcggcactatgcgctacgcttgttgtctgattgacgattaattcaccacgtgtgttcgattttcttttaacaacacgactatttaagtaggtacttccatgtcgagtaagctagtactggttcttaactgcggcagttcttctctgaaattcgccatcatcgatgccgttaacggcgacgaattcctctccggtttggccgagtgtttccacctgcctgaagctcgcatcaagtggaaaatggacggcgccaaacacgaagctgccctgggggccggcgctgcacacagcgaagcgctgaacttcattgttaatactattctggcacaaaaaccagagctttccgcgcagctgaccgccatcggccaccgcatcgtgcacggcggcgagaagttcaccgcctccgccgtgatcaacgacgaagttctgcagggtatcaaagattccgtgccgtttgcaccactgcacaacccagctcacctgatcggcatcgcggaagcgctgaaatccttccctcacctggctgacaagaacgttgccgtgttcgacaccgcgttccaccagaccatgccggaagaatcttacctgtacgccctgccgtacagcctgtatcgcgaccacggcgttcgccgctacggcgcacacggcaccagccacttctacgtgactcaggaagccgcgaagatgctgaacaagccggtggaagaagtgaacgtgatcacttgccacctgggcaacggcggttccgtcaccgcagtgcgcaacggccagtgcgttgacacctccatgggtctgaccccgctggaaggcctggtaatgggcacccgcagcggtgacatcgatccggctatcatcttccacctgcacgattctctgggcatgagcgttgatcagatcaacaagatgctgaccaaagaatccggtctgctgggcctgaccgaagtcaccagcgactgccgttacgttgaagacaactacgacagcaaagccgacgccaaacgcgccatggacgtgttctgccaccgtctggccaaatacgtcggcgcctacagcgcgctgatggaaggccgtctggacgcggtgatcttcaccggcggcatcggcgagaacgccggcatggtgcgtgagctgaccctgaacaaactgggcctgctgggcttcgaaatcgaccacgaccgcaacatggccgctcgcttcggcaaatccggcgccatcaccaaagacggcagccgcctggcgctggtgatcccgaccaacgaagagttggtcatcgcgcaggacgcatcccgcctgaccgcgtaatgctctcaaaacaccgtcagcccaggctgacggtgttgttttagcctcatgttaatcgtgaagaggactattctgtgtcacgtactattatgttgatccccaccggcaccagcgtcggcctgaccagcgtcagcctgggtgtcatccgctccatggagcaaaaaggcgttcgtctgagcgtgttcaaacctatcgctcaaccgcgcaccggcgacaacgcactcgaccagaccaccaccatcatccgcagcaactccaccatcccggcggccgaaccgctgcgcatggattacgttgagggcctgctgagctccaaccagcaagacgtgctgatggaggagatcgtggcgcgctaccacgagaacaccaaagacgcggaagtggtgctgatcgaaggcctggtgccgacccgcaaacaccagttcgccaacgcgctgaactacgagatcgccaaaaccctgaacgccgagatcgtcttcgtgctggcgctgggcaacgactccccggcgcagctgaaagagcgcatcgaactggcgcgcaccagcttcggcggcagcaagaacaaaaacatcaccggcgtgatcatcaacaagctgaacgcaccggtcgacgatcagggccgcacccgtcctgacctgtccgaaatcttcgacgactccaccaaggccagcatcgcccatgtcgatcctgcgcagctgttcgccaacagcccgctgccggttctgggctgcgtgccgtggagcttcgatctgatcgccacccgcgccatcgacatggctcgccacctgaaggcccgcgtggtcaacgaaggcgacatcatgacccgccgcgtgaagtccgtgaccttctgtgcgcgcagcattccgcacatgctggaacacttccgcccaggctccctgctggtgacctccgcagaccgtcctgacgtactggtctccgcctgcctggcggcgatgaacggcgtggaaatcggcgctatcctgctgaccggcggctacgccatcgacgagccgatcaagaagctgtgcgaacgcgccttccagaccggcctgccggtgttcatggtcgacaccaacacctggcagacctcgctgagcctgcagagcttcaacctcgaagtgccggcggacgaccaccagcgcatcgagaaagtgcagaactacgtggccagccacatcagcaccgagtggatcgattcgctgaccgccacctccgagcgttcacgccgcctgtctccaccggcgttccgttacgagctgaccgaactggcgcgtaaagccggcaagcgcatcgtgctgccggaaggcgatgagccgcgcaccgtgaaagcggcggccatctgtgccgaacgcggcatcgcggaatgcgtgctgctcggcaacccggacgagatccagcgcgtcgcggcggcgcaaggcgttgagctgggcaaaggcatcgaaatcgtcgatccggtcgccgtgcgtgaaaactacgtgccgcgtctggttgagctgcgcaagagcaagggcatgaccgaagtggtcgcgcgcgagcagttggaagacaacgtggtgctcggcaccctgatgctggaacaaggcgaagtcgacggtctggtctccggcgcggttcacaccaccgccaacaccatccgtccgccgttgcagctgatcaaaaccgcgccgggcagctcgctggtgtcctccgtgttcttcatgctgctgcctgaccaggtactggtctacggcgactgcgcgatcaacccggatccgaccgccgagcagctgtctgaaatcgccatccagtctgcggattccgccgcggccttcggcattgagccgcgcgtagcgatgatctcctactccaccggcaactccggtgcgggcagcgacgtcgagaaagtgcgcgaagcgacccgtctggcgcaggaaaaacgcccggacctgatcatcgacggcccgctgcagtacgacgccgccatcatggccgacgttgccaaatccaaggcgccgaactcaccggtggccggccaggcgaccgtgttcatcttcccggatctgaacaccggcaacaccacctacaaagcggtacagcgttccgctgacctggtctccattgggccgatgctgcaaggcatgcgcaagccggtgaacgacctgtcgcgcggcgcactggttgacgatatcgtctacaccgttgcgctgacggcgatccagtcttcccaggctgacgctgccgccgccaaggcctgatattcttcaggttgaacgataaaaaagcgccggtcattgaccggcgcttttcttttgcgttccctaacgcgccagcaactgcccggcagcctccagaatatgctcggcggtcaggccgtactcctgctgtaaaaacgcctgagtgcccacctggccgtaacgctccttcacccccacgcgccgcatcggcgtcgggcactcctccgccagcacttccgccaccgccgatcccagcccgttatgaatgctgtggttttcacaggtgacgatgcgtccggtcttggccgcgtaggttttgatcagttcacggtcaataggcttgagggtgaacatatcgatcaccgccgcgctgacgccctgccgcgccagcatctccgccgccttcagcgcctccgccaccatgatgccgttggcgatcagcgtgatatcgtcgccgtcgcgcagcaggttgcccttgccgatggtaaagcgcgagccctcctggtagatgcgcgtcgcctgcttgcggatggtacgcacccagtagaagccgcgcagatccatcagctggcgcagaacgtcggcgaacatggtggcgtcggtcacctccagcaccaccgaatgcgccagcccgcgcacgatgcccatgtcttcgaacgacatgtgggtgccgccgttgtggcaggcgctcaccccggcgtcggaagcgatcaccttgacgttgttgcgctggtaatccagcgacatgaacagctgatcgaaacagcggcggctggcgaaggcggtgaaggtgtgcacgaacggcacccggccggtgagcgacagcccggcggcgacgccgatcacgttggcctccatgatgccgcagttgatcacgtgctgcgggtgatccttgtgcacgccgtccatcgccatcgagctcatcaaatccgcctccagcgcgatgatcggcgcgcccgcctcaatctgccgccgcaccgcgccggcgtagactttgcgcatttcgacggtgtcgttttccaactgcgtcactacgttaaacatgggcggcctccagttcggcgatggctttttcgatctccagctgcacgtccggcgtcaggcgcaggtggtgtgagttcgacaggttttccagataggtcacgccctgccccttgatgctgtcgagcacgatcgccagcggccgctgttcaccgccgcgcgccggcgctaccgccgccagcagcgccgcgatgtcgtcgcccttgacagtctgcacctcaaagccgaaggcgcggaacttggcggccagatcgaacggttggatcacctcgtccagcgcgccgtccagctgttgcttgttgtaatcgatgaacagcgtcaggttgttcaggttgtggtgggcgataaactggaacgcctcccagcactgtccttcgttcagctccccgtcgccgaggatgctgaacacccggttgcgccgccccgccagccggtgggacaacgccataccggcggcgatcgacacgccctgccccagcgaacctgtggtagcgtccacgccgcgcgtacgcagccggtccgggtggctcggcagacgcgtgccgttctggttgagggtcttcagttccgccagcgggaagtagcccttgatcgccagcgtgctgtacaacgccgggccggcgtgccctttcgacagcacgaagtcatcgcgctccggccagtccggatccgccggatcgatgcgcatcacgccgccgtacagcaccgccagcgtctccaccaccgacatgcagccgccatagtggccgaagcccagcccggtcagcgctttcagcgtttccaggcggatcgcgcgcgccagggcacgcagctcttcaatttccgtttcgctcgttgtgtcgttcatcagtctgccctcgttatttctcgacgcggtcagcggccggcgcgcctttgcgttttcccaggaagttatgcgccaccagcagcgcgaacacggcgacgatcgccagcatgatcatctccttcgacataaagcgcgccatattgcccagcaggatgccgatcgcgccgaagtcggcgtcggagaaggtggtgttggcaaacccaagtgcccccaacaccggcagcagcagcaccggcaggaaggtgatcagcagcccgttggcaaaggcacccagcatcgcgccacgccgcccgccggtcgcgttgccgaacaccccggcggtagcgccggtgaagaaatgcggcaccacgccgggcaggatcagcaccatcttcagttgccccagcaggaacagcccggccaacccgccaaggaagctgaacaggaagccgatcagcaccgcgttgggggcatagggataaaccaccgggcaatccaacgccggccgcgcgttaggcaccagtttttccgagaagccggtgaacgccggcacgatctccgccagaatcaagcgcacgccctgcagaatgatgaacaccccggcggcgaaggtgatggcctggataatcgaatacaccaggtagttctggccgccgctgagctcgctttccacataggcccgcccggcgcagatcgccaggatcaggtagatgacgatcatggtcatcgagatcgaaatggaactgtcgcgcaggaagctgagatttttcggcaggttcatctcctcggttgagcgcgaatttttgcccaccttcgagccgatccaaccggacagcacatagcccagggtgccaaagtggccgaaagcgatatcgtcgttgccggtgatgcggcgcatatagcgctgggcaatcgccgggaagaacgccatcaccagccccagggtcaacgcgccggtaaacaccagctgcacgccctcgaagcctgccaccgtcaggatgatgccgatcatgcaggccatgtagaaggtgtggtggccggtgaggaagatgtatttcagccgggtgaagcgcgccaccacgatgttcgccaccatgccgaacgccatgatcaaggcggtggaagcgccgtatttctccagcgcgatagagacgatcgcttcgttgttaggaatgatgccctgaatattaaacgcgtgttcgaacatgccgcccaacggattgagcgacccgaccaataccgtggcgccgccgcccaacacgataaagccgagaatggtttttaccgtgcctttcaccacgtcggaaaaggatttcttttgcgccagcaaaccgatcagcgcaataagcccgaccagcaccgaaggcacctttaatatatccaccacaaacttgagcgtttcctggataaacatatccacctcgccaatcgttttattcagaggattgagtgggcttcgaagtaagcgcgcagcttggcttccagctcattgatgtcgatgatgttgctgatcaccaccagctgctcggccggcacgctggcgctgtcggcaatgtcttttgccatcacgaacacgtcggccgcgccgggagtggcggacgacagatcggagtgttcaacctcggcctccacccccatctttttcagcacctttttaatgttcatttccaccataaagctgctgccgagacctgaaccgcaaatcgccatgattttcatgatatccacctgttgaatttagcgtgtagggtagcgccgccggtcatattcccggcgttgttagcattaataatgttcctggtgattaaacgttaatagcgggcgataatatcctcgatttgccgtttatctttggcgtgaaataacgcctccatggcctggttatcggaaaataattccgccagttgcgaaatcaattcgatgtggctgttgctgtcgggtgcggaaagcatcaccaccacctgaaccggatcgttatccgcggaatgaaagttcaccccctgatggatcttcaacagcgataaccccagcgcgttggcgcccagctccggccgggcgtgtggcatggcgatgcccggcgccaggacgaagtaagggccgagcttctcctgctgatgaaagatggccgtcaggtaattcggcgtaatcacaccgtcttgcagcagcggctgcgcgctcagcgttaccgcctggcgccagtcctccacccgttcgcacagctgtatatgatcggcggtcagccactctttcagcacgttatcctcccgagagtcgatgattgcggccggtgattaattcaccggcgacggtaaaactttaatcaacccctcctggccacacagtgatggatatcacaaagatagcgctaccaaagcgctatcatgcagatctgtgatagcgctatcaaaacgccgtgctgcggtatgacgttaaccacaattttttctcgctctttcgggtaacggggtagaatgtgccgcatacggggatcgtcgaagccgcgccgtcggcttcccaccctcaccatttttatgcgccgcgcgcgcatttcagtcgggatttggcatgtcgatcggtaaaaaacgacgcagcacgggcagggtgacgttggctgatgtagcgcagctggcgggcgtcggcaccatgacggtgtcgcgcgcgctgcgcacgccggagcaggtttcagacaaactgcgcgagaagattgaagccgcggtgagcgagttggggtatctgcccaacctggccgccagttcgctggcgtcggcctcctcctacaccatcgccatggtggtgcccagcctgtccgaatccggctgcgccgagatgttcgccggcctgcagaaagtgctgcagcccgctggctatcacatcatgctggcggagtcgcagcaccacctggaacgcgaggagaaactgctggagaccctgctctcttacaacctggcggcggcggtgctgctcagcgtcgagcattcgcaaaatgcccgcaacgcgttgatcgccgccaacattccggtggtggagatcggcgccgtgcgcgccgatccgatcgacatgagcatcggcatcgattacgtggcggccatgtatcagctgacgcaaacagtgatcgccagcggctatcagaatatcgggctgctgtgcgccaatcaggaacagtggattttccagcagcacctgcagggctggcacaaggcgctgctgcgcaaccatatgtcgccgcatcgggtgatcaacgccgcacagcccgccagcttcagcaccggcgcacagcagctgccggaatttttgctggcctggccggagctggacgcgctggtgtgcgcctcggacgaactggcgggcggcgcgctgtatgaatgccagcggcggcgcatcaaggtgccggacaatctggcggtggtggggttcggcaacagcgagttcagccgggtgtgccagccgccgctgaccaccatgaccattccgcatcgcgatatcggcattcaggccggccaggcgctgctggcgcggctgaacgagcaaccctggcagccggcaggttccctgcccgccacgctgtgccgccgtgacagctgctgaatccacagcataaaaaaagccggtcgatgaccggctttctcacgcgttggcgtctcagtggttgtcgagcggcttaccgtaatcctgttcgttgttgcgcgtcagccacagcgacagcgccttcagcgaatccggggtaaattcgtcgcagcgcgcggtgatctcttccggcgtcagccagcacacttcagccacttcttcttcctgcagcgcgaacgggccgtgcgacacacagctgaacagcgcgccccacacccggcactgctcttcttcgaagtagaacagaccgtgttcggcgaaaggcacgccggcgatgcccagctcctcttccgcctcgcggcgcgccgagtccagcacgttttcaccgctttgcactacgccgcccgccgtcgcgtccagccagcccgggtagaagtccttgatctcggtgcgacgctgcaccagaatttttcccatcccatcatgcaccacaatataggtagcacgatgacgcagccgctccgcccgcatctgttgacgactggattgcgcaatcacctcgttttgctcgtcgacgatatcaacccattcggtatctgcagcctgaccctgttccgccatcctctaaaaccttctattttggcgcgatgcatcccgcgcgctggttaatcaatgagtgtttttcaaagatttttattgtgtgtgtataaattagtgcgtttagcgtgttaacgccacctccgcgacgaccttgccgtcgtcgagcgccagcacgcgcaaagtgccccgatccaacatgccgtagctggccggaaagccccctttcgggatgctgaccgagcccggattgaagcaatagatctcaccctgccgctccgcctgcggcagatgcgtatggccgtaggccaggacgtcaccgcgggataacggcggcagtgtcgagggatgataaaggtgaccgtgggtcaaaaacaatcgtcttttttgcagtaaaacctgttgccagggcgcctcgatagggaacgtcagcagcatctgatcgacctcgctgtcgcaattgccgcgaacggcgatgatcttgtcgctatagcggttcaatcgttcggcaacctgagcgggctgatacccggccggcagcgcgttgcgcgggccgtgattcagcaaatcgcccagaagaatcagccagtcggcgccctgttgtgcgaacaattccagcacacgttcggtagccggcagcgatccgtggatatccgaggcgaacatcagcttcataaccttgtcctatagagggaaataagcgccattttaccgcgccggcgccgtgcggcaaaccgccgcccgccccggtgtagaattgtgatccaactgcgcagatagcatcggacgaatcccacatagcctgctatccttagctgctattgttggatctctgatatacctttgtgcgcggcgaagaccgcagcaacgtgtaatgaattacagatcaccttaccgcaggaggcaacatgattgacctgtattacgcgcctactcccaatggtcacaagatcaccttgtttctggaagaggtcggcttgccctaccgtatccatcgcgtaaacatcagcgccggcgagcagttcaaaccggactttctgagcatttctcccaacaacaaaatcccggcgattgtcgatcagcaaccggtggacggcggcgcgccaatcagcctgttcgagtccggggaaatcctgctgtatctggcggagaagaccggcaagctgctgagcaagggcctgcgcgaacgcgccgccaccctgcagtggctgttctggcaggtggccgggttcgggccgatgctcgggcagaatcaccactttaaccactacgcgccgcagccggtgccttacgccatcgagcgttaccatctggaaaccaaacggctgtacggcgtgctggacgctgaactgcaaaaacacccgtacctgggcggcgataactacagcatcgcggatatcgccacctacccgtgggtggtgtcgcatccgcgccagcgcatcgatctggcagattacccggcggtgcgcaactggttcgagcgcatcagcaaccgcccggcgaccgagcgcgcctacaaactggccgaacaagcctaagcgcctcctccgactccccgtcggccggggagtcacatcgtcctcacgttatcatttccttactttccgtgtattctgaacgctaataatcagacctatggagaatctctgatgtctttcagtcaacccgacgccgttattcgcattaaaaatctgcggctgcgcacgttcatcggtatcaaggaagaggaaatcaacaaccggcaggacgtgctgatcaacgtggtgatccactacccggcggacaaggcgcgcaacagcgaagacatcgccgacgcgctcaactaccgcaccatcaccaaagcgatcatccgccatgtggaagataaccgtttcgcgttgctggaaaaattaacgcaggatgtgctcgacatcgtaaaagaacacgcctgggtaacctatgctgaagtggagatagataaacttctggctctgcgctacgccgattcggtctccatgaccatgagctaccgccggggctaactcagggaggtagaccatgcggatcctgatcaccggcgcaacgggattgataggcagcagcctgacggcaagactgctggcgctttctcaccacattacggtactgacccgcgacgagcggcgcgcccgagccaggctcggcgatcggccgagctattggcgaacgctggacgaccggcagtcgctggatgacttcgacgcggtgatcaacctggccggcgaacctatcgccgacaagcgctggagcgcgcagcagaaagagcgcctgtgccgcagccgctgggatctgaccgaacgcctggcgcagctgatcaaggccggcagcacgccgcccggcgtgctgatttccggttccgccgtcggctactacggcgatcaggggcaggcggtggtcaccgaagaggagccgccgcacgacgaattcacccaccagctgtgccagcgctgggaaacgctggcgctgcaggcgcagagcgacgccacccgcgtctgcctgctgcgcaccggcgtggtgctggcgccacaaggcggcgcgctggccaaaatgctgccgccgttccgcttcggactgggcggcccgatcggcgacggccgccaatatctgccgtggatccatctcgacgacatggtcaacggcattatttatctgctggatcacgccaccctgagcggcccgttcaacatggtggctccttacccggtgcataacgagcaattcgccgcccaattggccaacgtgctcgatcgcccggcgtttctgcgggtgccggcgttcgtcatgcgtttgttgatgggggaagcggcggtgctggtgctcggcggccagcgggcggtgccgaagcgcctggaagaagccggcttccacttccgctatctggagttggaacaggcgttggatgacgttgtcaatcagcgggccgaagcccgctgatctgaggttacttcaacgcgccggacaggaactgctgcaggcgcgggcttttggggttgccgaacagctcggccggcggcccctgttcttcaatcaaccctttgtgcaggaagatcacgtggttggaaacgtggcgcgcaaactccatttcgtgcgtcaccaccaccatggtcttcccctcctccgccagcttctgcatgatgcgcagcacctcgcccaccagttcgggatccagcgccgacgtcggttcgtcaaacagcagcacctccggctccatcgccaatgcgcgggcgatagagacgcgctgctgctgaccgcccgacaggtgcaccgggtatttgccgcgcgcccgctcgtcgatgcccactttgtccaggtagcgcaccgcgcgctcgtgcgcgtcggccttgctcagccccagcacctgcaccggcgcttccatcacgttctccagcaccgtcatgtggctccacaggttaaagtgctggaacaccatggtcaggcgggtgcgcagcagctgcagctgcttcttgtcgaataccttcagctggccgtccttgtcgcgcaccatgcgaatatcttcgttgttcagactgatcgaaccttcgctcggcttctcaaggaagttgatgcagcgcagaaaggtgcttttgccggagccggatgagccgatgatgctgatcacatccccggcgttggccgccagcgagacgcccttcagcacttcgtggtcgccatagcgtttgtgcagttccgtgacggctaatttattctcagacatggttttcttcccgtcatttatcagtgactaacgtgtgccatccagcgtttctcagctttgcggaacaggctgattaacacgtaggagatgatcagatacagcaccgccgcgatgccgaaggcgtagaacggctgataggtcgcggcgttgatgtcgcgcgcgatcttcagcagatccggcacggtggcggtaaacgccagcgcggtggaatgcagcatcaggatcacctcgttgctgtaagccggcagcgcggtgcgcagcgccgaaggcaaaatgatgcagcgatacatcttgaagcgcgagaaaccgtaggcgttggcggcctcgatttcaccgtgcggcaccgagcggatcgccccggcgaagatctcggtggtataagcgcaggtgttgagcgtcagcgccaggatggtgcagttgagcccgctgcggaaaaacgcattgagaaactcgctgccgcgcacgatctcgaggctgtacatgccggagtagaacaccagcagctgcacgtacagcggcgtaccgcgaaacacataggtgtagagccacaccgggaaacgcacccagcgaagggaagacacgcgcgccaccgccatcgggatcgccagcagcccgcccatcaccactgaagcgatcagcagccacagcgtgatcgccacgccggtaaagcggtagccgtcgctccacagcagcgactgccagtactgttgcaggatatcgatcatagctcggccctcttgacgcccagtgagtaacgccgttcaagccacagcagcacgccgttggaaacggtagtgaagaccagatacaccacgccggccacgatggcgaagaagaacggctgataggtgcctttccccgccagctgcgtggctttgaccacgtcgttcaggccgagaatcgacaccagcgccgtcgccttcaggatcacctgccagttgttgccgatgcccggcagggcaaaacgcatcatcgccgggaacagaatgcgccggaagatctgcgcgccgctgaagccataggccgtcgccgcttcgatctgccctttcggcaccgccagataagcgccgcggaaggtctcggtaaaataagcgccgtagataaagccgagggttatgatgccggcgccgagcggatcgatatcgatctgcgcgaagcccagcagcgtagtgatattgttcagcgcgatttgcagaccataaaagatcagcagcatcagcaccagatcgggcacgccgcggatcagcgtggtataggcgccgaacaggccggagataaaggggttatgagacagtttgccaccggcgccgatcaggccgatcaccaccgccagcagcacggaactgagggccagctccagcgtcaccagagccccctcgaaaatcagttgggaatagccttgcagcatctacttcaccctgtggtctaggatccgaaccatcggggccggcacgccggccccacagtcacagcatggaacggtaagcggattacccgccatagacgtcaaagtcgaagtactttttcgcgtatttgtcgtaggtgccgtctttgcgcatctcggcgaaagctttgtccagcgccgccttcagctcggtatcggtcttgcgcagccccatgccggtgccgacgccgaagaacttgtcatccttcaccgattcgccggcgaacgcatagtctttgcccggcggctgtttcaggaagccgtcgctgcccgccacttcatcctggaaggcggcgtcgatacgcccggaagccaaatcggcgtaaaccagatcctggttctggtaaggcacgacggtgatgcccttcggctgccacatggcgttggcgtaggcttcctgggtagtgccctgcaacacgcccacgctcttgcctttcagggcgtccacggtaggcaacagcttggatcctttcggcgcgatcagacgcgcgttggcggcatacagcttgtcggtaaaggcgatttcctgctggcgtttttcggtgatggacagcgaagagatgatagcgtcgattttcttcgccttgagggatgggatcagcgcgtcgaagtcgctctccacgaaggtgcattgggtattgatgcgtttgcacagctctttggccaaatcgatgtcaaagccaaccaattcgcctttggcgtttttggattcaaacggtgcgtaagtcggatcggtgccaatcttcagcgtggaaggaatggcggcaaaggcgctgctggcggcgctcaaagccagaactaacggcaaaatcaaaacccgctttttcataaattaccctcaaattgatttttttgatgccactacgggcattacttttccccaccaaatcaatttgcagtaatcgtgccacattaggtgctacgggcggagggaacggctccggccttcacaatactgtttcctgggacgataaccgcaaaattaaatcggccgctcggggccgcgccactggcagccgcgataaggcggcgccatgaaacagtgaacgtgatgaagtgggatcattatggtgcatgcgccgccctaattcagtgcggtgttgcacaaatgtaccaatttggggatgaaaatgttaatcagcgccctgccagcgggtgaacagatcggccggcagttcgatatcaaactgatcgatcacccgattgacggtctgatcgatgatgtcttccacgcttttcggctggtggtaaaacgccggcaccggcggcatgatcaccgcccccatctccgccgcctgcgtcatcagccgcaggtgcccaaggtgcagcggcgtttcccgcacgcacagcaccaaacggcggcgctctttgagcaccacgtcggcggcgcgggtcagcagcccgtcgctgtagctgttgacgatgccggacagggttttgatcgaacatggcaggatcgccatacccagggttttgaaagagccggaggagatggcggcggcgatatcgcgcgcatcgtgcaccacgtcggccagcgcctgcacttcacgcaggctgtacggcgtttccagcgccagcgtctgccgtgcagcgttgctcatcaccagatgggtttccacctctgcgacgtcgcgcaaaacctgtaacaggcgcacgccgtagatcgcgccgctggcgccggaaatgccgatgatgagtcgtttcatggaaaatggcctctgccgtaaaaagtaagatcaggcagactttgccgcaatggcgagggataagcaagttcacaggagcaaggcgcaccgccgcagacgcggcgatgccccccgagtaatcaacgcggccggttagccttcgttgtgcagttccagattttccgcttcggtttgccctcgcagcgccttggcgtcgtcgctgcgcagcgactccaggtattccagatagctttgatcgacgtctttggtcacgtagatgccgttgaataccgagcattcgaactgggtgatgtccgggttctcttcgcgcaccgcttcgatcagatcgtccaggtcctggaagatcagcccgtcggcgccgatgatctggcggatttcatccacttcacgcccgtgggcgatcagttcgttggcgctcggcatgtcgatgccgtagacgttagggaaacgcacttccggcgcggcggaagccagatagacgcgcttggcgcccgcttcgcgcgccatttcgacgatctgctccgaagtggtgccgcgcacgatggagtcatccaccagcagcacgttcttgtcgcggaattcggcgcggttggcgttcagcttgcggcgcaccgactgacggcgcgcctgctggcccggcatgatgaaggtgcggccgacgtagcggttcttcacaaagccctggcggtagggcttctcgagaatacgcgcgatctccagcgcgatatcgcaggaggtttccgggatcgggatcaccacgtcgatgtccagatcttcccattcgcgggcaatcttctcacccagcttctggcccatgcgcacgcgggcgctgtagaccgagatcttgtccataaaggagtccgggcgagcgaaatagacgtattcaaacaggcacgggttggttttcgggttctctgcgcactggcgggtgaacagctggcccttggtggtgatgtacaccgcttcgcccggcgccacatcgcgcaggaactcaaagcccagggtatccagcgccacgctctcggaagccaccatgtactcgctgcggccatcctccagcgtgcgcttgccgatcaccagcgggcgaatgccgttcggatcgcggaacgccagcaggccatggccgatgatcatcgccacgcaggcgtaagcgccgcgcagttgctgatgcatggcggcgaccgcggtaaagatgttgtcggcctccagcgggtagtgcgggaagcgatccagctcgctggccagcacgttcagcaggatttccgagtcggaggtggtgttgacatggcggcggccgctttcgaacagcttttggcgcagctcatgggcgttggtcaggttgccgttgtgggccagcgtaatgccgaacggcgagttgacgtagaaaggctgggcctcagaggcgctcgagctgccggccgtcgggtaacgcacatggccaatgcccatgttgccctgcaagcgttgcatatggcgcgcctcaaacacatctttcaccaggccgttggctttacgcaaacggaacccgttgtgggcgtcaatggtgacgatgcctgcggcatcctggccacggtgctgaagcaccgtcagcgcatcataaatcgactggtttaccggcatgaaaccggcgataccgacaataccgcacatgttgtcttttcctcatcagcgctaccgccccggcaattgggtcggcaagaaactcgacgtgctctgcaggtagtcaaagaaccacctgatgacgtaactgaactggggaatgagctgcgactgtttccagtcggcactctgtgaaaagccggtaaaggtatccaggaagaacaggatcgccgcgacgatcaatactccgcgcagcgcgccgaagcagatgcccaacacccggtcggtgcccgacaacccggttttctctaccagagagctaatcacatagttaacaatagcccctacgatcaaggtcgcgatgaacaaaatcgcgatcgcgatgccgtttcgcaccagttcatcttcaaaacgagtgaaatagaccgcaaggtaagagtagaaatggctggcaacaaaaaacgcacatccccatgtcacaagtgacaatgcttcgcgaacaaaccctcggatcaggctcaccagagccgaaaatccaatcaccgctataatgacgtaatcaatccagaccatgaactattccaatgatgaatcgcccctgcatccaattcgcggcgaattctaacagaaaaagaaaacgtttgcgtaggggatttcctaccacgttacaaataaaaagcggcgatcaaaaaattcccaatcgccgcgcctacataggtgatttcgcctgtaaaaggcgcggtttttctcgctttctctccaccactccttaattcaggggcgcatcgtgctgcgcccctgcggggtttaacggccgtacggcttcacctgcccgctcagcccgctgatcgagttcagcgacggcagcgccgcctgcagcttctgcttggaggcatccgggccgacgtagatacgggtgatctgcccctgcaccggcgttgacggcacggtaaaggcgcgatagcccgagaggcgcagcgaggcgacaatctcgttcgccttggcggcatttttcaacgccccgagctgcacgacgtaggcttgcccggccggcgctttttcttccgccggtttcggctgcggcgtcggttcaggtttcggcgtcggctccggcttcggtaccggcttcacttccaccggtttcggttgcggcgccggtttcggtttcacttccaccggtttggtttctaccggtttcggcttgggctgcggcaccggctgaggacgcgtttcgaccggcggcggcgccacctgcgccggctgctgagcaccttgccgcaccgcctgttgcgccgccgcttcattggccgcctgctgttcgaccagcgcgcccgccccttccggcggctgcgccggcaacggttgcgtcaccggtggcagcacgtcgttctcttcgacgtcgcccgccttcggcaccaacggaatggccgcgaattcatcctcgtaatgcttctttttaccgtccagcaaccctggcaggatgatcacccccagcgccaccagaatcacggttccgaccagtcggttctgaaatttactcgccactcacactccccgcatctcgtctgacgccgccatcacctgcgccacggtgtggaacgatccacagacgatcacaatatcctgtttatcagcatcctgcatagcctgccgccaggcagtttcgacatcattaaagcgtcgcggttccgccagatgttgcgccagctgttcgacgctggcgccgcgcggcccgtcgagcggcgcgcagtaccattcatccacctgctcgctgaggcaggccagcgtgccggcgatatccttgtccgacagcatgcccaccaccgcgcgcaccttgccgccgttgcgcggcagtttggccagacgcccggcgagatagccggcggcgtgcggattgtgcgccacatcgaggatcagcgtcggctcacgccgcacgatctggaagcgccccggcagcgtcgcctgctgcagcccggtgaaaatcgcgcgttcgtcgatttccagtggagaacagttgagcgccgccagcgcggtagcggcgttggccagcggtacgttcggcgtcggcagatcggtcagcagcgtgtcgccgccctgccactgccagcgatcgccctgctcgctgaagcgccaggcttcgccgcggcgagacagcggcgcgcccagcgtttcggcaacctgacgaatgctgtccggcatgtcgggttcaccgaccaccgccggtttgccgctgcggaaaatgccggccttttcacggccgatgctttcgcgatcgttgcccagccagtcggtgtgatcgagcgcgatgctggtgatcaccgccacgctcggatcgacgatgttggtggcgtcgaggcgcccgcccaggcccacttccaggatcaccacgtcgagccgcgcctgtttgaacagctgcagcgccgacagggtgccgaattcgaaataggtcagcgacgtttcgccgcggccggcttcaatggcggcgaacgagcggctgtgctccgcttcgctcagctcttccccctgaatgcgcacgcgttcggtatagcgtaccagatgcggcgaactgtagacgccgacgcgcaggccggcggccagcagaatcgcttcaagggtgcgacaggtggtgcctttgccattggtgccggcaacggtgaacaccgtgggtgcgggggtcagtaaatccagatgcgccgcgacgcgctgtacgcgctcaaggccgagttcgatcgcctggctgtgcagacgttccagataataaagccacgagctcaatggcgacgtggcttggggaatttggtggttttgcatgagtcccatcactgaacttgggttcattaatccatcagggcaccaccctcaccgcggtaaaggcgatgcgcttcgtcactgccgccagcctgccaaccgcagcggataggctacggccggcggagagcgggcatcagccgtcacttagccacaaagtggcggctgaacccgggcgggatctgtctttgcctcaggcgtcggcctgctgctccggctcaatgaccggcgcggcctcatcgaaatgcggctgcggctggttggtcagcttggacagaatgctcgccaacgtttggcgcatttccggacggcgaacgatcatgtcgatcgcgcctttttcgatcaggaactcgctgcgctggaagcctggtggcagtttctcgcgcacggtttgctcgataacgcgcgggccggcaaaaccgatcagcgctttcggctcggcgatgttgatatcgcccagcatcgccaggctggcggagacaccgcccatggtcgggtcggtcagcacggagatatacggcaagccgcgctcctgcattttggccaacgccgcgctggttttcgccatctgcatcagcgacatcagcgcttcctgcatacgcgcgccgccgctggcggagaagcacaccagcggacagttgtcctccagcgcctgctcaaccgcacgcacgaaacgcgcgccgaccacggaagacatagagccgccgatgaaggcgaattcgaaggacgcggcgacgatcggcataccgtacagcgtgcccttcatcaccaccagcgcgtctttctcgccggtcgctttctgtgcggcgaccagacgatctttatagcgcttggaatccttgaatttcagaacgtccttcggctccagatcgctgcccagctccacttcgctgccttcgtccagcagggtatgcagacgcgcgcgcgcgcccatacgcatgtggtggtcgcacttcgggcacacttccagattccgctccagctcggcgcggtagagaacctggccgcagctgtcgcatttagtccagaccccttcaggaatgctcgccttacgggtttgtgtgatgttgctcttgttaagaattcgttcaatccagctcatcgatgacctttctgtttgaacctggcacacgccagtccgctgttcatgctttaacaatccccccgaaaacaccccaatgaaaaaatgcccgttcgcggcgcggcaagcgcggcgactgaggcatcggcttcagggttgttcgcaggaacagaccataatgtcgctcattaaaccatatcggcccgacgctgtggacaaaaaactggtcgaaccgacaggttaagcgatgtttttactgtttttgctggcgggcggccgcgcgcttgtggcgccaaatttcaatcacccccggcagaatcgaaacgatgatgatcccgacgatcaacagtttcaggttctcctgcaccaccggcagatcgccgaacaggtagccagcataagtgaagagcagcacccaaaccagtgcgccaatcacgttgtaggcggcgaagtggcgataggacatatgccccataccggcgacgaacggcgcaaaagtacgcacgatcggcacgaatcgcgccagaataatcgttttcccgccgtgcttctcataaaactgatgcgttttatccaggtagctgcggcggaagattttcgaattcgggttgctgaacagcttctcgccgaacaaccgcccgatagtgtagttcaccgcatcgccgatgatcgccgccacggccatcaacgccaccatggtgtgcacgttcagatcgttggtcggcaacgccgccaacgcaccggcgacgaacagcaaagaatcccccggcaggaacggcgtcaccaccagaccggtttcacaaaacaggatcaggaacagaatagcgtagacccacatgccgtattgtgcgaccagttcggccaggtgcacatcaatatgcagaatgaaatcaataataaacttgatgatgtccataaattctctcattgatgccgggcgtttcaatcacccggcagaagcacaagggagcgacgctttcaggcgtgccggcgtttaatcgtcgggcaaaaacagcggccccatcggcggccgcggcagaccaaagtggtcagggtaatccacggcaaccagatacagcccctcggctcgcgccgtcgccgccgccagattgcgatccttcagtgccagcaactcggccatccagttctcatcctgattgccgcagccgatctccatcaggctgccgacgatgttgcgaaccatgtgatgcacgaaggcattcgccttgatatctaccacaatatattcgccgtagcgcgtaaccttaacgtgttttacgcagcgccacggggtgcgcgactggcattgcaccgcgcggaacgacgtgaaatcgttctcgcccagcagcgcctgcgccgcccgatgcatgcgatcggcgtccagcgggtgataaaaatgcgttaccccctgctgcagcaccgccggccggtagcgatggttgaaaatgatatagcggtagcggcgcgcggtggcgctgaaacgcgcgtgaaaatcgtcggcaacggggctcacccaacgcaccgcgatatccggcggcaaatgggtattcacccccatcgtccaggcggcgtccttgcggcgcgcggtagtttcgaaatgcaccacctgcccggtggcgtgcaccccggcgtcggtacgcccggcgcacagcacggtaatcggcgcatccgccaccttgctcaacgcctgctccaggcgttcctgcacgctggccacttcttgctgccgctgccagccgtaataacggctgccatcatattcgatgcccagcgctaccttcagcgtcggctgagcgggcgagaccacctcagacatcagtacatctgctcctgcaccagacgctcggcggtttcgacagccatcaacgcgccgccgaagcgcacgttgtccgccaccgtccagaactgcagcagctcggggatgccgtaatcgttacgcaggcagccgatgctgagcgcatcgctgccggaagcgtcggtgacctgggtcgggtaatcgtcctcttcgctcagctgaatatcttcgacctcttcgagctcgctgcgcgcctcttcggcggacagcgggcgcagcgcttccaggtgcaccacctgcgcgtggccataaaacaccggcgactgaacgcagctcaccgaaatcggcagcccttcatcctgcagcaccttgcgcacctgatcgacgatcaggcgctcttcgcgcacgctgccctgctcgtcggcgacaagcggcagcaggttgaacgccagctgtttaccgaaaacgccttcctcggccggaatgccgttcagcagacgcgcgctctggccggccagatcgtccaccgccaccttgccgcgcgacgataccgacatcagcgtggtgacgtgcagacgcgacagccccgcctgttcggtcagcggtttgatcgccgtcagcagttggctgaccatgctgtcggccaccgccacgatattgcggttacggtaatccgccagcacctgcgggttcacgcccggcaccaccagcggcacatccggctccatggcgaacaggccgctggtgtcgatcaccaggcagcccatgttgccggcttcttcggcatagcgcgcggaagcgtcgctgccggcgacgaagaaggccagctgcgcctgcgaccagtcgaactcttcggcgttttgcaccagaagagacttgccgttgaagcgcacattggcgcccgcgctgcgttcgcttgccagaggatagagctcacccaccgggaactggcgttcctgcaacaattccagcaacgcttcacctaccgcgccagtggcgccgagcagcgcgatattccagccgtcagacatcgggttttctccagagtatttcattcataaaagcacacgggcagtgcaatcaccgcccgataatctttaccgctcactgtagcggcgttggcttaagacaaccttacgccctacgccacgctgaagcccagcttgccgagcagctcggcgctggcgctgtcatcgcattgcacggccagcgaagaccactcgcggcgctcctggtagtgcttgcgcaggcgatcgaattcgcccggttgcccggcgactttgcgcaatggcgcatcatcgcggcgcacatcatacaccaagtgcatcaatcgttttaaccgcgcttcatccagcggcccgttgaggcggatctggctgaactccggcaccggcagcagcgaggccagcgccacctgctgcggctgccccagatggcggctgaacgcttcgaacacctgggtggtgccgcgcgccttgccttccagcgtatacccggcgatgtgcgcggtgccgatatccacccgcgccagcagcggcaaggcgaggtccggctccggttcccacacgtccagcaccgtgctcagctttttgcccttttccagcgcctgcagtagcgcggcgttatccaccaccggcccgcggcaggcgttgatcagaatgcggttgtccggcagcgccgccagcaggtcggcatccgccagatgcagcgaatggtatggcccggatttattcagcggcgtatggaaggtcagcacatcggcctcggccaccagcttctccaacggccagaactccccggcgtcgccgcgatcggcgcgcggcggatcgcacagcagcgtgcgcacgcccaacgctttgaggcgcgcgtccaggcgggaaccgacgttgcccacgccgacgatgccgacggttttatcccgcagctggaagccgtcgcgttcggccagcagcatcaaggcggagaacacatactcgaccaccgcgatggcgttgcagcccggcgcggcggaaaacccgatgccctgccgttgcagccaggcgtcatcgatgtgatcggtgccggcggtggcggggccgacaaagccgatgcggctgccggccaacagggcttcattgaccttggtgaccgaacgcaccatcagcgcatcggcatccgccagcgcctcaagcgggatcggacgccccggcaccgcctgcacgtcgcccaggcggctgaacagctcggccgcgtacggcatattttcatcaaccagaattttcactgcgttctccgacggtttacggctattggtctgcgaaatagtgtgccactgaatcaggcacggcgaaagcgctcaggggtggtgccggcgatctgctggaacatgacgataaaggccgacgcggagctgtagccgacatccaacgccacgtcctgcacggttttgccctgctcgagcaacgacacggcatgcagaaaacgcaggcgctggcgccactcgctgaacgacatgcccagatcctgctggcagcggcgcgacagcgtgcgctcggtggtgtagacccgcgccgcccacgttgccagcgaggtgttgtccgccgggcaatgctccagcgcttccagcaccggcgccaaaaatttgtcgtctgacgacggcagataggtttgctgacgcggcgacaggcgcagctggtcgatcagcacctgacagaggcgcaaatcctcctccgcctgcggaatgtactgcttgcgcgcatagaaatcctcggcgatggcacggaagatgggcgttacgctcaccagacaggggtcggccggcatgccggcgcacagcgccggcgtaatgtccaccatgcggcactgcgccagtcgctggttgtagcaggagtgttcgatgcccgccggcgcccacaacacgaactccggcggcgccagaaagcgctgcccgcctatgcgcagcaccatcaccccggctttgacccacatcaactggccccaggtgtggctgtgcggctggaattcggtgcgcgcgttaaactcttcacagcggaactgcaccgggttgggcgccgggatcagcgactcagggaaatggcggatttctggcatggtttcgtcccgtgatttgtcttgtttacgccgatttttgtctggatatcgctatatatgataaaccggacacgcgtagactagccagcatgttggacgttattgagaataattatcatgaatatgctcttcccactgttggccgtgctgatatggtcgattaacgccgttgtcagcaaactctccgccaccgccatcgatccggcggccatttcactttaccgctggctgctggcgctgatcgccctgacgccgttcgtgctgccgggcgtgctgcgcaattgggcgcaggtgcgcgccaactggtggaaactaatgatcctcggcttgctgggcatggtgctgtatcaaagcctggcctattacgcggcgcacagcgtcagcgcgctgtttatgggcatcatcgtgtcgctgatcccgctgctgaccatcctgatcagcatcgtcctgctgcgcattgcgccgaccgtcggcgtgctgctcggcagtattctctccttcggcggtttgatctggctggtcagcggcggccagcccggcgtgctgctgcagcacggtatcggcaagggggaattgatgatgctgctcgccaccgcctcttacgcgctgtatggcgtgttgaccaaacgctgggccatcgcgctgccgaactggcaatcgctgtacgtgcagatcctgttcggcgtgctgctgctgctgcctaatttcctgatggcgcaggatgtcggcttgaacggccataacctgccgctggtgctgttcgccggcattccggcttcgatcatcgccccgttcctgtggatccagggcgtgatgcgcctgggcgccaacaccgcctcgatcttcatgaacctggcgccggtgtttaccgccgctatcgccgtgctgttcctgcatgagcagttgcacggttatcacctgatcggcggcggcattaccctgctgggcgttatcctgtcgcagcggctgcgcacgccgctgacgcgtaaagccaaagccccggcggccgacgtcgagtcctgcaaagaacaggcttaaggcaacagcctgaaacgcacccgcaccaacagaccgcccagcgcggcggagctcaacagctccgggcgggtgccgtgataggcggtgatgtccttcaccagcgccagccccaggccggcgcccggctgatcgcccacgttgtccagccggtgaaatggctgcagcgccagcgccttgtcctgcaaggcgatgccggggccgctgtcttcaatctccagcacgccttcccccgtcgccttctcctgcgtgaggcgagcggtgaccacgccctgacgcggtgtgtatttcaacgcgttgtccaacaggttggcgcacagctcggccaacagcagcggttcccccgccacctgacacgccgcttcaccttcgaagccgagatcgatctgtttgctgcgcgcctgcggcaagcgggaaaaacaggcgtcgcgcagcacctgcgccaggttgaccggctgcagcttgcgctcggcctggtgctcgctggccttcaggcgtgagagatacagcaggcggtcggtcagtgccacggtattgtccagcgtcgcgctcatcgcctgcaggctttcgcgccactgctgcggccgatcgctggccagcgccaccccgacctgagtcttcaacaccgccagcggcgtgcgcagctggtgggaagcgtcggcgctgaaacgttcctgacgcgccaccatcagccgcagccgttcgatatagcgattgaacgccaccagcagcggctgcatctccgaccacggcaatacccgcggcaagggcgtcagctcgcccggatcgcgccgcagcatgatgccggagagtttacgcatcggcttcaacacccgcttgagcagcgcgaacgccaggatcagggtcaacaccaccaccgtgccctggctcagcagcgccgcgatcatcatctgccgcgccaggtaacggcgcgactccagggtttccgccaccaaaatggtcgccatgccgctcacccccgactcgttgaccggctgaaacagcgccgccacgcggatcggccggccgagatattccgcatcgtaaaaatgcaccagcgccgggtagagcgtggaacgcgggatatggggcggcagcgacggcaaatcgtcatagcccgagatgctttttccctgcggcgaaatcacctcgtaatacagttgatcgttcatgttgcgctcgaagctgtcgagcaccacatagggcacatcgactgccaacttgccttcgcgcaccaccagtcgctccgccacggtgcgcgccgacgccagcagcgtgcgatcgtaagccagagtggcggcgctcatggcgctgaagtagtgggtgtagatagagatgccgcccagcgccagcagcggcaggccaaaaaacagcagcagttgatagaacagcgaacgcggggcgttaaaccaccgcattgcagagctccaggctgtagcccagaccgcgcagcgtgacgatcgccacgtcgctgccctgcagctttttccgcaggcggtgtacgtaaagctcgatgctctccggattggcctcgtcggacagcgtaaacacctgctcgaacagctgctgcttggccaccgggcggccgcgccgatgcatcagcgcggtcaacaccgccagttcgcgcggcgtcagcgccagcggcttgctctccagcagaaaatagccttcgtcatggtaggtcaacacgccgtactgcaacgccggctgcggggcgccgacgctgcgacgcagcagcgcccgaatacgcgcctccagctcgtccaattcgaacggcttggtgaggtaatcgtctgcccccagattcaggccccttacccgatcggccacgtcggtgcgcgccgtcagcaacagcaccggcagatcctgcccgcgcttgcgcaggcgcgccagcaaatccaggccgttcaaacgcggcaacgccacatccaacaccgccagcgcataacgctcgttgagcaacagatgatcggccgccacgccgtccggggcgacgtcgacggcaaacccggcgccggtcagcgccttttgcaaccagtgagacagctcggggtgatcttcaaccaataacagtcgcatgttcccattccattgatttacctgaacaacctggcgccgacacggcatccgttaacaggctgataacaaaggatggcatggaaaataaggggataaaagagcgccgcgccgccagttttgggagctggcacacaattatgcgtatggagcgcgatcgcagggcggcgtcagatcagcggaatggggctatcggcaacggcaatgtccagcaccgggcgcagcttgtcggcggtaaacggcgaagaaaccagcacggagcggttgttggcggcaaacaccagatcgatgccggtcacgcaggcggtcatctgacaggcatacttttcaccgtcggcgttgacgaaatgcagctcaaacacgccaacctcggggcgcaggcgcttcaaacgacactgcccgctttctcccgccatctcggcgtagacctcaggcaaccgtttaattgcgcatactttggcgctgtccctgccaccaaacaatttccctaacgaaaacatattactgcgtctctattcatttcactgatcatgattttatcgcaaaagcagaacgacaaacctgatattacgcaggattttggccggtttagcgccctgttcttgccctcgtttctatggtagcgcacccgccattcgctggcgacaagagaccctaatcacagactggaaacttttccggccactgaaaggtaaatgaaaggttgttgttttaacaatcctgcaaccgcacccggcgggatttcacaaccagaacaataccgagggcaagtcacaatgaaaaaaataatgacccgaacctttaccgccgccgccctgttgctggcggcctctcagtccttcgccgcagaggcgcccaaacgcaccgaatgcattgcgccggccaaacccggcggcggcttcgatctgacctgcaaactgattcaggtgtcgctgcaggataccaaggccatcgataaaccgatgcgcgtcacctatatgcccggcggcgtcggcgcggtggcctacaacgccatcgtcgcacaacgcccggcggagttcggcaccgtggtggccttctccggcggctcgctgctcaatctggcccagggcaagttcggccgctacaacgtggacgacgtgagatggctggcggcggtcggcaccgactacggcatgatcgcagtgcgcgccgactcgccttacaaaaccctgaaagacctgatggacgctttccaaaaagatcccaacagcgtggtgttcggcgccggcgcctccatcggcagccaggactggatgaaaaccgcgctgctggcgcgcgaagtcggcgtggatccgcgcaagatgcgctacgtggcgttcgaaggcggcggcgagccggtcaccgcgctgctgggcaaccatattcaggcggtttccggtgacctgagcgagatggtgccttacctgcagggcgacaagatccgcgtgctggcggtgtatgccgagcaacgtctgccgggccaactggccgatattcccaccgccaaagagcagggatacagcctggtgtggccgatcattcgcggcttctacgtcgggccgaaagtcagcgatgaagagtatcagtggtggatcgacaccttccagaaaatgatggcgaccgacgaattcaagcagcagcgcgatctgcgcggcctgttcgaattcaacctgaccggcaaagagctggacgcctacgtgaagaaccaggttgcccaataccgtgagcaggcgaaagtgttcggcctggccaaataaccgcaggggaaaaccatgagcgatcgtatttttgccggtttttggctgctgctgtgtatcggcgggctgttcatcggctggggcatccagagcgaatacagctatgaaccgctggggccgcgcccgttcccgctggcgatcctcagcctgatggcgctgtgcgcagccctgctgttgctgcgccacccgcaggcggtggagtggccgcacagcaaggtgttgcagcggctgctggtgctggtgatcaccctggtgctgtatgcctggggctttgaatggctcggcttcccgctggcgaccgcgctgctgacgttcagcatcggcctgttgtttcaggccagcctgccggcggcggccatctccggcgtcatcatgggcgcagcgttgtactacgcctttgaccaacttctcgatgtcacactgccgctcggcgcctggctgagctaacgggagcgatgatggatacctggatgtatttgacccaagggtttgaagtggcgctggtgccgcagaacctgattatcgccctgatcggctgcttcgtcggcaccatcgtcggcctgttgccggggctggggccgatcaacggcgtggcgatcctgctgccgctggcgttcgccctcaaactgccggccgaatcggcgctgatcctgctggcgacggtgtatatcggctgcgaatacggcgggcgcatctcgtcgattctgctcaacgtgccgggcgacgcggcggcgatcatgaccgcgctggacggctacccaatggcgcagcaggggcgcgccggcgtggcgctgtccatctcggcggtcagctcgttcgtcggctcgatgatcgccatcggcggcatcattctgttcgcgccgctgctggcccgctggtcgctggccttcggcccggcggaatatttcgccctgatggtgttcgccatcgcctgcctcggcagcatgatgagccagaacccgctgaaatcgctgctggcggcgctgatcggcctggggctggcaacggtgggcgtcgacgccaacaccggcgtttaccgctttaccttcgacagcgtgcacctctccgacggcgtgcagtttatcgtggtggtgatcggcctgttctcggtcagtgaaatcctgttgatgctggaaagcaccagcgccgggcaaaagctggtgcgtaaaaccggccggttgctgttcaaccgcaaagaggcggcgcagtgcgcgggcccgaccctgcgttcgtcggtgatcggtttcttcgtcggcattctgccgggcgccggcgccactatcgccagcgcgctgacctacatgaccgagaagaaaatcagcggcaacagcgataccttcggcaagggcgatatccgcggcgtcgcggcgccggaagcggccaacaacgcctcggcctgcggttcgttcattccgatgctgacgctgggggtgccgggttccggcaccacggcggtgatgatgggcgcgctgacgctgtacaacatcacccccggcccggcgatgttcaccgaacagccggatatcgtctgggggctgatcgccgcgctgctgatcgccaacgtcattttgttgatcatgaacctgccgctggtcggtctgttcacccgcatgctgaccatcccgctgtggttcctggtgccggcgatcgccgcggtttcggcggtgggggtttatgcggtgcacagcaccaccttcgacctgctgttgatggtcgggttaggcgtgttcggctacattctgcggaaaatgcatttcccgatgtcgccgctgattctgggctttgtgctgggtgagatgctggaacaaaacctgcgccgcgcgctgtcgatcagcaacggcgagttcggcattctgtggagcagcagcatcgcgcaaacgctgctggtattggcggtcgcggtgctggcgttgccgccgctgctgcgcctgatgcgcaaacgccgccaaccgacggccgaggccaaggccgaataacgcgaaacgggcggggatcccccgcccgtagtgtttaacggcgcaaggccgccattcccctttccagcgccccgatatcgttatcggcaagcaacggctgaatcaccgcaaagtccacctcggacaagtcatagaggcgcaaggcaagcaaccgtgcgatgacttccggcgcgaaccgccaacggataaacctcgccgggttaccaccgacgatggcataaggcgcaacatcgccggccaccacgctaccggcggcgacgatcgccccctcgcctatcgagatccccggcatcagcatcgcccgcatgccgatccagcagccgtcacccagccgggtatcacctttgggacggtatgcctgcttgatggttgccataaacgggtacaggctcagccagtcgatgcgatgggtgtgattaccgcccatcaggatcaccgcttcggccgcgatgcacacataatcgccgatcagcaggcgatctatttcgcccagcggctgccattggcggctgaccgcgtcgccgtgcagatagcgcaccaccgagcgttcgaagccgttatcccagcagtcgctgtagtagctgtgggtgcctttgacgatgatattcgggttggtcaccgtctgatgcagcagttcggtttgggaccagtgtttttcggacatggcgtattctcttgttaccggaataaaagccacggaacggaatgtctgtggccgtgttgtcgttcactcaacacggccattcaagcgataagcgctcgtttcaatctcgggttattcatcattagtgcctcccttgcgaggcacaagggtaaccgatcacgcctcggcggtcttgcttttcaacagcagcaccccgcccatcaccaacgcgctgcccagcagctgcagctgattcatgctttcccccagcaggaaataggcgatcaccgcggtgaaaaccagctccaacgacaggatcaggttggctacggccagcggcagcgttttcaggctgatgttatacaacccgaagcccaacagcgtcggcccggcggccaatgccagcagcaacagccagccgctccactggatgccctgtgcgccgtgcgacaggaaccacaaatcgccggccatgccgtggaacaccgccaacgggaacgccgtcagcgccgcgttgaacgccagctgatacagcgccgaaaaaccgaacacgtacaggatggtgttccacaccggatagccgcgttcgctggccacccgcccgccgagggtatacagggtatagccgatgcccgacagcatccctaccagcagccccagcagatcgaagtggctgttccccatgctgtcgccgttgctgaccaggaagcaaccgcccaggctgatggcgatcaccagcagttggcgcagcgtcaggcgctcgctgtacatcacccagccgaggaacacggtaaagcccaccgaacagtaggtcagtatggtcgccaccgacgcgccattcagcgctaccgacagcgtccacaggctgttgaacagcgccagcagcagcccgtaaagcgcgtagaacaccacctgctcacggcgcagacgcgcccactgcggtttcaccagcaacagcagcggcaacagcaccagcgccaccagcgccgcgcgccagaacgccagcacgaaggtcggcagctgatagtactcggtcagcgcgcggatgatgatggcggtaaaggccagcagcatggcgctgataatggcgatgacgtaaccctggcggctgccctgcaagagacgcgcgccgggcaacaaaggccgggcggaaacgcctgacggtaatgacatgagatcctcgggaaaatggcgacataaatgctcaggcgcacagtgtaacgcggccatattttcccactatagccacttttcagcgttgtcatgcaggccacttttctgcgcttgaagccctgttgacatggggtatagtaaaaagctctctccctaaccgggccaatttcgcatgcacattccgttagatcgcgagcaggacgttccgctgtatttgcagatcgaagaagcgctgcggcgcgccatcctcaccggcgtgttcgtggatggcgacaagctgccctcgacacgcacgctggctgccgaattggcggtcagccgtttgacggtggataacgcctatgccgaactggcggccaagggctttttgcaccagcggcgcggcagcggcgcctatgtcgcgcacccgcaggcgcaaacgcgcccggcccggccgaccagcaatgcccctttcccgctggagagcttcaccaccctcacctcgcggctggacggctatgccgacgccccgctgccggaggggctgatcaactttgccgccggcgtcggcagccccaagatatttccgctggaggcgtttcgcaaagtgctgctgtcggtgctcagccgccacgcggaagaagccttcagttacggcgaatactgcggctactacccgctgcgcgatacgctgagccgcattctcagcgcccagggcatccccacgcaggccgaacaggtgctgatcaccaacggttcgcagcatgccatcagtctggtggtgcaaagcctgctggcgccgggtgatacggtgatcgtcgaagagccgacctacgccgaagcgctgggcctgctgcgccagcaccgcatcaatatcgtctccgtgcccggcgatcgccacggcatgctggtcgatcgactgcccgagctgctggaacgccaccgccctaaactgatctacaccatccccaacttccacaacccgaccggccgctgcctgagcgaggcccgccggcggcgcctgctggcgatcgcccaacaggccggcgtggtgatcctggaggacgacttcgtcggcgatctgcgttatcagggcaaacagctgccgtcgctgcgcgcgctggcgcagccgggcgcggtgatctacgtcagcaccttctccaagatgctgctgcccagcatgcgcatcggctatctggtggcggacagcgaacactatcagcgtttcgccaggctgaaacacgtcgacagcttcaccagctccagcctgatccagcgcgcgctggacgcgttcgtcaccgtcggccgttacgacaagcagctgcggcgcgccggacgcgtctaccgcctgcatctggaagtgatgatcgacgcgttgcaacatcggctgccgccggggtgccgtttcgaaacgccgcaaggcggcttgtttatctggctgacgctgccgaaggcggtgaccaccgccgagctgatgccggtggcctggcgacacggggtgaccttcgcgcgcggcgaatgcttctatgcgcaggaacagctgggcgcacacggcctgaggctgaattttgccgccaactcgccgccgcagattgaagaaggtatcgcccggctgtgccgggcgattgaggaagtgatagcggagaaaagcaccggttagacggcggcccaccacagccgcagcttcatcccccagtagctggtccagccggtggtgctttgcaccaccttgccctgcgagatcaccacgaaggtcggcgtgacgccaatccgccactgcgccgacagcgcgccggccggatcgttgaccaccggcagcgccagccgtttacgcgccagccactgcttcacctgggcatcatcgcccgatcgcagcgcgacggtcagcacgttgccgcccgccgcctgcaagcgggcgacgtccggcgtggtgaaacggcaaacgccgcaccagctggcccaaaagtaaaccagcagcggccgctcatggctgagctgcgccaacgacacgcgctcgccgtccagcgaggtcagcgtctgggcatcgaaggccggcggcgcctgcggcgcattcagccaatccatcaccgtcaccaccgccaatgcgatcagcgccagcagcaacaactcgcgcccccagcgcttgagcttagccattgttagccttcgccaactgctgtttcaccatcgcttccagctcttcatacgacaccgcccccggcagcattcgatcgccgatcagcgtcgccggcgtcccttgtacgcccagttgctccgccaacgccatattggtgcgcagcgtggtcatgctctgttcgctcggcgccaccgccttgacgccggttttctcctgcgcggcggcgatgctggcattgtcgtggaagccctttttcgccatcagccgctggtgcagggcccagaattgatccgggtgctgttgccaggtggtgagcgccacgcgcgccgaactgaccgagctttcgcccttgaacggcagcagcttcaccaccagcgctacgtccggatattgcttgacgattttctccaacatcggatcaaaacgcttgcagtacgggcagttatagtcagtaaaggtcaccagcgtcagtttggcgttggcggcgcccaggcgcgggctggccggatcctggtacagcgttttggcgttctgcttgatagcctggctgatttgctcgccggcggtttgctgctgccaggcgtccaccgcctgcgccagaatgtccgggttggacaccagcgtttcgcggatcatctctttgatacgcgcctcttgcgccggggtgaaaggctcggcggcccacgctggggcggcgatgatcatcagtaaaatcagtagttttttcattgttcggttcctttggcatgggaaagcgtttgcagcaaggcgtcacgggtcaacagcggggatagcaccacgccgtccgggctgccggggccatagacttggttgaaaggcacggcgacgctgccgcgcttttgcaggaaggcgccgatgtcggccgatggacggctccagtcgccgcgcagcgcgaccacatcgtcggcgctcagcgcgcgctgtacgtcatcacgcagcagcacattgaatttgttggctttacaggtcacgcaccagtcggctgtcacgtcgacgaacacccgcttatgctgcgccagcgcctcggcgatcgtttgctcgctcagcggttgccactgcacccgatcctgcaacggttggcgccacaggccggcgctcagcgatccggccagcaggaccacccccgccagcaccacagtgcctgccgccagcttggccgccaagcgtgccccctgttggcgccacaccgccaacagcaacgccaacagcgccaacgcccccagccacagcgtagcctgcgcgccaatatggttgctcagcaggctcagcagccacagcgacgacgccagcatcagcagccccatcgccagcttgacggtattcatccagcggccggggcgcggcaatcgcagcgccagcgacggccaggcggcgatcagcagccacggcaggctcatgccgatgccgagcgcgatgaacatgccccacagcaccggcagcgacgccgccagcgcgaaggccaccgccgtgccgagaaacggcgccgagcacggcgtcgccagcagcgtggcgaacgcgccttgccagaaatggccgctcagaccgcgcccgttatgggtcgccagcgaggtattcagatcggacgagagacgcaaatggaacaggccgaacaggttggcgctgaacagcagcgtcaccagcaccataaagccgataaaccacggattctggaactgaatgccccagccgagcgcgtggttgccgagccgcagcagcgtcatcagcagggccagcgccataaacgaggcgacgatgcccagcgacgacgccaggaactgcagacaaacgctgcgccgatcgcgccgctccacctgcaggatggagccgagcttgatgcccagcaccggcagcacgcacggcatcaggttgaggattaacccgcccgccagcgccatcaataccgcctgccacaacgggaacgccgcaccggcgggcgcggccaacgcatcaccaatcggcagcgtaatctgctgcgccatgccgccgtcgtcgatcaccagcgtcagcgttttgccgcgcaggtccggcgccgcatcgccccagccatcgctgaccggcactcgcgccagcaaccgatcgccgtcggtttcaacctgcggcttgccgagatcggcatccgccagcgtatcgaagaacagcgcaggctgttgccagccggcggcgcgttcggcggcaatctgcagctcgccgctgcgatacccggccttgacgctttccgccaacccggcggcgatcggcacctgccccatcgcctgcgcgaaatcgtgattaaactgcggatcgtgaggcgtcgccagatccagactgaacgggtagtcggtcagaatgcagacgttgctgcaggtggacagcgtcagcgtacccgccagcgggccggatacctggcctgacatcacgatcggcaacgtgacccgatcgtgatagccctgggtggaaatgccggccacctcgaaacgctgcggcgtcggccagtgccaggtcgccggcggtgggttgccttgccagacgatagccggcgcgatgccgccttcgcccggagagcgccaataggttttccaacctttttgcagctcgaccgacagcagcaggcgggtctcccccggctgtgacgtgtcggcgcgcagccgcaccttggcatgatcgttggccggattttgcagccagccgctgtccgccgcctgcaaggcaggcagccacagcataaacaggcaagcgcaggccagcctgatgattttcaacatgttaattctccataaatgattaattcaccacgaaaaacgggcgattaactcattcacggaagacgcataatcgaaggtgcaccctgagggtgggtggtgaaatggcgcgaggaggaggaatgcgcagacgcgcggcgatggtcggcgccaacagcgccagcagcagacccagcccgaacagcacggtttcgaacatcaccggcggcgcggccagcaatgacttggcgctcagctcacagggcgtcggctgcgcttcggcggcctcatcgccggattgaacggcggtggcggccgggatccccagcgtttgctgcagcgcatgcaggcccgccatgcgctgggtcatgcacgtcagcaccaccaggcaagccaggcataaaaaccattttgcaatccgctgccgtttaaccatgccatcctcatgttcagatctggggttatcttagcggcgcagacgcgattagcaacgttttgtcggtaaagaaatgtctgagcggcggtattgatggcggcgatttacaggtatcatagtgggtaagcctgcgcttttcgccgggtacgatgacgattctctcctccaggcattctgcggggatacacagcgaaggactggtgatatgcaacctttgagtgggccgggcaccccaatcgccggcgaacgccccccctccccgggcaaaacggcggccactgacgatcaacccctctctccggcgcagcgcacgacgctggaaaaactgatcgtgaaaatcatgacgctcagcccggtcaaatcggcggagctctgggcgtctctgcgtcacgatctcggcgccgacaaaggcggcgaactgctggcgcgccattttcaaccggcggaacagctgctgcgaacgcgcctgacgcaggcgcagcaaaaccatgccgggcgtcaactgctgcaacagctggccgaattgctgccgcagggcaataaccgccaggcggtcagcgactttattcgtcagcagttcggccatacggtgttgagccaactgagcccaccgcaattgcaacaggtacttaatctgttgcaaaccggcggcctgaccattccccagtcgcagcaaaccgccaccagcgatcgcccgctgctgcccgcagagcatcaaagcctgcagcagcagatcaccaaactcagcgccgccaccggcgaagcgccggctaaaatctggcaaacgctgttcgatctggcgggcgtgaaaaccaacgatccgctgccggcgcgccacttccagctgctgaaccagtttttacaagtgaaggtggcgctcagcccgcagaacgcgccgacgctgaacaacctgttggcggcactcaagcagccggcggacgagcgagaactgcagcagatgaacgactattgccaggcgcgcttcaactgcggcgccaatgcgccgctgacgcatccgcaaatgagcgacgccattcatcagctgtttgcccgccgtctggataaagccggccaggcgcagccgatcgccagccaccctgtcgaaccgcagccgctgctcaacccgctgatcgccgccttgcctctgccgctgcaaaaagcgctgagcaagccggccgtagcgctgatcctgctgctgttggcgttggcgatcgtgctggcgctggtgttttaacgcctcaggcgcagccgcagtcctcagcagccgcccgagcgcgcaacgatcccggctgttctccgatggccaatggatggccatcgcgcagccagaagtccagcccgccgatcagctccttcaccctgaatcccagtttcgccagcttgtaagcacctttggtggatccgttgcagccaatgccgtcgcagtaggtcacatacactttccggcgatccagctgcgccgtgccggcttcatccatcaggcgatgcggcaaactgagcgcaccggggatatgcccggcggcgtacagcgcctgcgcgcgggtgtcgatcaccaccatcccgtccacgccattgcgcagatcttccgccacatcccaggcatccgcatagcggctcagtttagccgccagataggccaggctttcttccggcgccgccggcggaaaagccagcaccaatgattctttcgacatatcacttactcccgtgcatcaagacagatgacaatagtgccccattttggtcttatgattgatacccattatccacagatgataagacccattatgcggcacacgctgatcacgctgtttcagcaatcgccccaggccgtcggcacgctgcgcgaacgtctttgtgcagcattgcggcaggccatccaccacggcgcattgaacattgggcaacgcctgccctccagccgagtgctggctggggatctgaaactctcaagggtgaccgtcgaagcagcgtacggccagttggaggcggaggggtatttgcagcgccgcgtcggccagggcacatttgtggctatccgcatcgccaaatcgccgccgccgccgcctcgcaccgccatgccgcgcctttcgcaacgcggccaacagatcgtgcaaaccggcggctgccgcgatccgcagcagccacaggcgtttgccgccggctcgccggatctgcgcgcgtttccgctagccttgtggaagcaactgaccgcacagcgcctgcggctacagggagaaagcctgctgcgctacggcgacccgcagggctatttgccgctgcgtgaagcgattgccgcccacgtcaaccaaacgcgcggcgtaatctgcgatgcaaaccaggttatcgtgctgaccagttcacagcaggcgctgcagctgatcgccacgttgctgctggacagcggcgacagcgtctggatggaagaaccgggttacgccggggcgagaaacgcctttatcagcgccggcgccgccctgacgccggtggcggtagacggcgacggcctgcgcgctgagccctccttgcccgagccgcgtttgatttatttgacgccctcgcaccaatacccaaccggcgcagcgctcagcctggcgcgccgcttggcactgctgacgctggcggaaaagcagcaggcctggatcattgaggacgattacgacagcgagtttcattacgacggcctgccgataccggcgatgcagggtctggatcgccgtggccgggtgctgtacctcggcaccttctccaaatcactgttcccttcgctgcggttggcgtacctgatcgtaccgcccacgctggttgaagcgttcgtcaccgcacgcacggtgtatgacggccacagcgcgcagctgatgcaggcggtcaccgccgaattcatccgccaggggcacttcgccgcgcatatccgctacatgcgccaactctaccatagccggcgcgatgtgttgctggcggcagtacgcgaaaaactcgaccacttcgccacccccgctcccgccgccggcggcctgcagctcagcgtctggctgccgcccggccaggaggcggcgctcagccggcaggcgcggcggctcggcatccttacgcccgggttaacagcgcaataccaaacggttcaggcgcagcgcgacgggtggctgctgggcttttcggccctgacgccgggcgagatccgctgcgccgtcgagcggctggcgcggatcaccgtggcttagcctggccccaatgggacgccgatcggcttattgttcggtcaggcgcatctccgccaccagcggcaggtggtcgctcaccgccggccaatgcacgccgttccagtcgccgctggcgttcggcaccgtcaggctgtccagatgccagcgctgcgcgttgccggtgaagatgtaatccaccttgatctcggcgttttccgccggccagctgcggccgtcctgcccgttgggcatgatatcgttccaataacggctcagctccagccaggtgacgctgcccggcacatcgttcatatcgccgaacagcagcttgatgccgcgcacttcgatggtgcgatcgttcagctcccgtacctgatccagacgcatcgtcggatcttccttggtatcgaggtgggtgttgaacagggtgatcggcgtcgggaactccggcacatcgaccttggcgctgaaggcgatgcgctgttcgcgctggccggacggcagcggatagatcacggcgtcgtgcagcggatacttcgacagaaacgccaggccgtattcaccgccgtcgaaatcgatcgcccggccgaacaccgcctgcatgccggtcagtttcgccagttccgccgcctgatcgacccgcccgctgcgggcggtgagtttatccacctcctgcagcgccaccacgtcgacattcatcgcgcgaatcgccttggcgatggcggtcatgtcgctgaccttgccggcggcgatattgaagctggcgacgcggatcttcggcgcctgctccagttcgtaggttttgttcttcaggccgcccaacgcgctggccacttcgcggctgttggcgttgctgttggcgtgcccggtatcggcagacgaccaggcgctgtgagagatgcccagggacagtaaggtgataagcagagcgtgaccggtgtgcatgaattctccttgagggacagataagtgttatgtgggcgcttcctggcccacagctaacaccgattttgccgcagaaacctgcgactatttcctagttgcaccgctatttttcgtttctgcgcgatgcttcgcattctggcggtttacgcattgcaccgttggacaaacggctgatttcgttttaaaaccggtagattgccaaccgcgaggagttccgatgaccagcccgattgccgaacagcttaccgaacgtttcttccgttatctggcggtgaccagccagagcaacgccgccgcagccaccctgcccagcacgccggggcagcatgagatggcgcaactgttggcggacgagctgcgccggctcggcctggccgacgtgcagatcgacgagcacgccaccgtgaccgcccgcaagcccggcacccaacccggcgcgccgcgcatcggcttcatcacgcatatcgacaccgtggacgtcggcctgtcgcccgagattcgcccgcagcgcctgcgcttcaccggcgaagatttatgcctgaacgccgagcaaggtatctggctgcgtaccgccgagcatccggagatcctgccctaccgaaacgaagagatcctgttcagcgacggcaccagcgtgctgggcgccgacaataaggcggcggttaccgtggtgatgacgctgctggccaacctgaccgcggccgatcgccacggcgatatcgtggtggcgttcgtgccggacgaagaaatcggcctgcgcggcgccaaagcgctggatctgcagcgtttccccgtcgatttcgcctacaccatcgactgctgcgaactgggtgaagtggtgtacgagaatttcaacgcggcggcggcggagatccgcatcgagggggtgaccgcccacccgatgtcggcgaaaaacgtgttaatcaacccgatacgcatcgccaacgacatcatcaaccgattcgacgtgcaggataccccggagcacaccgaggggcgcgagggctatttctggttcaccgatctggccgccaacgccaatcaggcgacgctgaaggtgtcgattcgcgacttcgatcgcgcggcgttcgaggcgcgcaaggcccgccttgaggaaacggtgcgccaggtggcggccaactacccgcgcgccaacgtcagctgcagcgtcagcgacatctacagcaacatcagcaacgccatcggcgaggaccggcgcgctatcgatctgatcttcggcgccctcgccgcccacggcatcccgccgaaggtgatcccgatgcgcggcggcaccgacggcgcggcgctctccagccgtggcatcctgacgcccaattacttcaccggcgcgcataacttccactcgcgcttcgagtttttacccgtcagcgccttcgtgaaatcctatcaggtgacccgcagcatttgcctgctggccgcgcggcaaagcggccaaccggcttagctcatcacccagccgagcaacgcggcccatgccaacagcggcagcgaataatagtggaagcgcaaccagatcttgcgctcccccgccatgcgcaacgcaatcaggttagcgagcgatccgatcgccaacccgaagccgccggcgttgaccgcataggccaactgagcgctggagggcatatagttgagcaacagtatggtggccggcacgttgctgacgatctgcgacagcccgacgcccaacgcatacacgctcccctcgctcagcccggcgatggaggcgaacgccggctgaagcggcggcaaacgggtaaacaggccgacatcgatgaacatggcggcgaacacgaaaatcaggctccagtcgatctgcaacagcactcggcgcgccagcagcaagaaaccggcgaacaccgccagcagcccatacaacggcagatcgaaatcgagacacagcaggaaaaccgcatacagcccgacacagctcagcaacagcggccgctggtagggatacccctcggtattcggcgttttcacgatgtcgcgcgccgggaagctgaaccaggtcagcaccagcaggctcaacatcattgcgacgccaaacggcgccatctggccgatgaagccgaggaaagagaggccggagcggctccacagcaggatattttgcgggttgccgatcggcgtcagcaacgaaccggcgttcaccgccagcgcctggaagatgatcaggcggccgaccggcagcgccgacagctttttcagcgtgatggtgagcggtatgacgataaacagcgctacgtcgttagtcagaaatgacgacaacagcgcggcggagaacaccaggaacagcgccagccgccgttcgctgtgcaagcggttgataatcttgcggccgacaaaatcgaagtagccgctgacctccacccctttggtcagcagcatcagccccaacagggtgatgagggtacggccgtcgataaaaccacccagcgctgccagcggctgcggatgaaaggcgaacatcgccacgccggccagcagcaatgcatgcaagaaacggtctttggcaaagggatggatgagccgggaaatggcggttgaactcatagcggcagtgtgaacctcaccgaaaagaatgggcagacgttagctcagacgcggcttcagcgccagcaaaatgctattttacctttatccgctttccatttgccgcgctttactttatttgtagcggctttcacggtttcaaaggacatgttatggcttccctgttcgccaacggagcgctgttgagcgccttatgcgccctgctcgccgcctgcgacgacgcctcctcccgcccgcaaatcgatattgacggcaaaaccatgggcactttctacagcgtaaaagtcagcggtgacgtcgcgatcggcaaacaagaattgcagcggcagatcgacacggtgctcgaacgggccaacgacgacatctcgacctaccgcgccaattcggtgctgtcgaggtttaaccgcaatgttagcctcgaaccgcagtctatcccgcgcgacatggcggacatcgtgttgatggctcaacgcatcggccgcgataccggcggcgccatggacatcaccgtcggccccttggtgaacctgtgggggttcggtcccgacaaacatccggtcaaggtgccggaacaggcgcagatcgacgcggcaaagcagcgcaccggcctgcagcacctgaagctgatcagcgacaaccgcggggagtggctgcaaaaagatctgccgggcatgtatgtcgatctctcgacgctgggcgaaggctatggcgccgatgagctggtgcgcctgatgaaccgtcacggcattaccaactacctggtatcggtcggtggtgcggtctcttcacgcggcgtcaacggccagggcaagccctggcgggtggcgatccaaaagccgaccgaccgtgaaaatgcggtacaggcgctggtggatcttcacggttacggcatcagcaccgccggcagctatcgcaactactttgaacaaaacggccagcgctactcccatgtcatcgatccgaccaccggcaggccgatcaaccaccggctggtttccgccacggtgatcgccccgaccgcgctcgaggccgacggctgggataccggtttgatggtgctgggcccggagaaagcgttgcagctcgcggaagagaaagggctggcggtctacctgatcagtaaaaccgacgacggcttcagcgccgtgatgacgccgcagttcaaagcgtttttggtgcagtgagataaaaaaagcccggcacgcaatggccgggcttggtcctgttccgcgccgatcacttggtcagcgcgatgatgccaagggtcagaccggcaaccgccgccgcgccgccggcgatcgcgcccgcggtttcccagttatcctgagtggtacccttcatgcaggtgttggtgtgcaccagacgcccctggtcatcatagaccggcacgcagggagaatcggtggcgcatccggccaacacggccgacagtaacccaaccgcaattaactttttcatacttcttgcctcaatgttcgatcactttagaaagctacgccgagcgataatcacgctacctggctattgtatgcccaacgcgtgtaatggcgaggtaatgatgtgtcaggggatgtgatttgggaaaactccgagcgcccggccagtgggcttcgggcagtaaaaagcccgcgaaaacgcgggcttgatggcgaggtgaagctcaggcggaattatttcgccagtttgcgcatcaccagggtggcgttggtgccgccgaagccgaagctgttggacatcacggtggtcagctcgcgctgagtcggctgagtcacgatgttcatgccgaccgcctgttcatccagggtttcgatgttgatgctcggtgcgataaatccgtgctccagcatcaacaggctgtagatcgcttcctgcacgcccgcggcgcccagcgagtgaccggtcatcgccttggtggaggagatggccggggtattgtcgccgaacacttcgcgaatggcgcccagctctttcacgtcgcccaccggtgtggaggtgccgtgcacgttgatgtagtcgatcggcgcgtccagatcctgcatcgccatcttcatgcagcgcactgcgccttcgcccgaaggggcaaccatgtcggcgccgtcagacgttgcgccgtagccaacgatttctgcgtagatatgtgcgccgcgcgccagcgcgtgctccagttcttcaaccaccaccatgccgccgccgccggcgatgacgaaaccgtcacgatcggcgtcgtaggtgcgagaggctttttccggcgtgtcgttgtacttggtggacagcgcgcccatcgcatcgaactcgcaggccatttcccagcacagctcttcgccgccgccggcgaacacgatgtcctgtttgcccagctggatttgctcaaccgcgttaccgatgcagtgtgcggaggtcgcgcaagcggagctgatggagtagttcacgccgtggattttgaatggcgtcgccaggcaggcggaaacgccggaagccatggctttggtgaccacgtatgggccaaccgctttcaagccacgcgggctgcgcatcgcatcggcgccgaacacctggaagcgcggagaaccgccgccggaaccggcgatcaggcccacgcgcgggttgttttgatactcttcttccttcaaaccggaagaagcgatcgcttcttgcatcgccaggaaggcataaatggaagcgtcgctcatgaaacgcaccgccttgcggtcgatcaggccggtagtgtcgagcttaacttgcccccatacgtgactacgcatgccggaatctttcagctcctgggagaaagtgatcccagaacgtccttcctgcaggcttgccaggacctcctgctggttattaccaatgctggagacaactcccaggccagtaatcactgcacgtttcattcaatacctcttccactatttacctacgggattttgcatcgcactttagcgtacagatgtaagccgaacaagtccgatcagcgtttttcagctttattgtcgtccagtttgcgccggggcgccagcgccgttagaattcgcggcatcccttgaatttcgagccattgaccgtgaaccacgcccccatccaaaccgcaacgctaacctggaacgaacagggtacacctgtttcgaaacagtttgatgacgtctatttttccaatcaggatgggctggaagaaacccgctacgtcttcctgcacggcaatcggctgccgcaacgtttcgccgcccatccgcgctcgctgtttgtcgtggcggaaaccgggttcggcaccgggctcaatttcctcacgctgtggcaggccttcgccggcttccgccaggccgagccggacgcgacgctgcagcgcctgcactttatcagcttcgaaaaatttcccctgcagcaggctgacctggcggcggcgcatgcgcgctggccggagctggcgccttacgccgacgaactgcgcgcccaatggccgctgccgttgccggggtgccatcgcctgctgttggccgaaggccgcattacgctcgatctgtggttcggcgacgtcaacgatctgctgccgcagtttgacgccagcatgaataaccaggtggatgcctggttcctcgacggcttcgcaccggcaaaaaatcccgacatgtggaccgatcaactgttcgtcgccatggcgcgtttcgcccggccgggaggcagcttcgccacctttaccgccgccggcttcgtgcgtcgcggcttgcaacaggccggttttcaggtcaaccgctgcaaaggcttcggccaaaagcgtgagatgctcgccggcgaactcccggccgatacgcagcccgccgcacatccggcgccctggtatcgacgcccggcggcggacaacaccgccgacgtcgccctgatcggcggcggcgtcgccagcgcgctcactgcgctggccctgctgcggcgcggcgccaccgtcacgctgtactgcgccgacgaacaggcggcggagggggcatccggcaaccgccagggcgcgatttatcctttgctgaacggcagcggcgacgcgctggagagtttcttcagcgccgcgtttcccttcgcccgtcgccagtacgacgccctgttgcaacaaggcgtcgcctttgatcaccagtggtgcggcgtcagccagttggcctatgacgacaaaagcggcgccaagatcgccaatatgctgaaaaccgactggccgcaggccttggcgacggcggccgaccgcgagacgctcagcgatcggtgcggcgtcgataccggctttggcggcatcacctacccgctaggcggctggctgtgcccggccgagctgacgcgcggcgctatcgcgctggcgcagcgtcagggcttggtctgccactaccggcacgatgcacagaggctgacgcaggaagaaaacggctggcgcatcgatttcgcccacggcgaaagccgcagccatgcgacggtgatcttggccaacggccaccggctggccgaactggcgccgacggaagccctgccgctgtattcggtacgcgggcaggtgtcgcatatcccaagctcgccggccctcggtcaattgaaacaggtcttgtgttacgacggctacctgacgccggttaatgccaacaacggccagcactgcatcggcgccagctatcagcgcggcgacatcgccaccgactaccgcgagcaggagcaacaggaaaaccgtgaacgcctgctgcgctgcctgccggaacaggcctggccgcagcaggtggacgtcagcgctcagcaggcgcgctgcggcgtgcgcagcgccacccgcgatcatttgccgatggtcggcgcgctgccggactatcaggccacgttgacgcagtatcaggatttgcagcggcagaaccagcgcggcgaaaccgtcgccgatgcgccggtctatcccggcctgttcgctatcggtgggttgggatcgcgcgggctatgttcggcgccgttggcggcggaaattttggcggcgcagctgttcggcgagccgttgccgggcgatgcgcgcctgctggcggcgttgaatccgaatcggatgtgggtgcggaaattgctgaaaggacgtgcggtttaatcaaccttgaggggcgcggcgacgcgccccggcatgacgatcaggcggcaggggttgcagcctgatagaggttttcccacatgccgcgcaccaggatctgatccggcggcgagagttccccggcggcgatcgctttgtgcaggctctcctccacccgcgctttcagcgctgcggcggtgtgttcgccctgctcttccgcctcggccaccgccagcgtcagatgaccgcgcaggtagccaccggcaaacagttcatcatcgctggcgtgctctaccatgtcatcaatcagcgccaaaatgcgcgcttcaaattctgcgatcatcaaatttcctcattaaataacgggctgtggcgtcagttgagatcttccggatacggaaaatgctcggccgccaacggtggcgtattgtagaacgattgcagcgcctgaataaagcgcgcaggccttgtgggtattccctgctccagcagcgccaatacccgggcgcgcaccttgcgttggaacgcaatgcgatccggctcgcagtcgccgttcaggttgtcgcagctgacgttgaacgggaaaccggccgccacgcagaacatccattccagtgcctgcggtttgatctctaccgcttcgaattcgctctgggtctgcgcgtcgcgcccgtccgggcaataccaataaccgaagtccaccaattggcggcgcgcttcaccggcgatgcaccagtgcgaaatttcgtgcaggccgctggcgtagaaaccgtgggcgaacacgatgcggtgatacggcaattcgtcgtcggccggcaggtagatcggttcgtcgtcgcccttcaccaggcgggtgttgtagtcatcgctgaagcagcgattgaagatcgcgatcaactgctcatagtgatgacgggtctgcgtgtctgacataaaaactctataaccacaaaaataaagaggccattatacccgataagacagggcgcgtaagcagcgcaccctcttcatctttaaccgtgcaagaaggcggacagccactgctgaatctctgcgccgtgattgtcgtaaagcagcttgaggctcatcaccagcgagacgatcacgatcatcggccgaatcagtttctgcccgcgggtcagcaccatgtgcgcgcccaaacgcgcccccagcacctgccccaccagcatcaccagaccgatgctccacaccaccttgccgccgatgatgaacagcgccagcccgccgacgttggaggtaaagttcagcaccttggcgtgcgccgtggacttggcgaggttgaaaccgcacagcgtcacataggccagcgcgtagaatgagccggcgccggggccgaagaagccgtcgtaaaacccgacgcagccgccggccaccagcccgaacggcaaggcgccgaggcggcgttgacgatcttcctcacccaggcgcggcatcagcaggaagtagagaccgatgccgatcaccagcagcggcaacatctgccgcagcacatcggcgcgcatatgctgcaccagaatggcgccggcgatcgagccgatcagcgtcagaaaaatcgtcagcttctggtcgttgaggttcaccgctcgccgacgaatgaagtacagactggcggagaaggagccgccgaccgactgcagcttattggtcgccagcgcctgcgccggaggaacccccactgccagcaaggccggcaccgtcagtaatccgccgccgccggcgatggagtcgataaaccccgccagcagcgctaccgcaaacaacaccccgagcatctcggggccaatgacgaaccagtccatgtgttattccgctgagaaatggtgatccagcaatgcctgacaggtaggcggcaacggcggcggcacgggtttgcccggcttcgcgttaggctgatgcggcacgaaccagctcgccagttcggcgccgcagccatcgcccggcggcggcgtatcctgctcctggcactccaggctgccggccgggcaacgcaggcgcacgtgcatgtgcgcacggtggccgaaccacggccgcaccttgtgcaaccaggcgcgatcggcgccggcgtccagacacagacgctgcttgatcgccgggttgacgaagatacgcgtcacctccgcatcctgcgccgccagcttgatcagcgactcaatttgcggttgccattggttcgccaccacctgcttgccgtcgcccgacaccaggtcgatcggctgcggcttgagcaattgctgcgcgctccagcgttggcgcggcagctgcagccagatgtcgacgtcgagcccagactggtggctggcgtggccgctgctgaagcgcccgccggccggcatcgccatatcgccgatcagcaccgtgcccagcgctttctggttcgctttgctgctgaggcgctgtatgaacgccagcagatccgggtggccgaaatagcggcgctggtcggtacgcatcacctggtagttcggtgagttcagcggcaacggctgcgcgccgatgacgcagccgttggcgaaaccgcccaccgcctgcggcgcgccggccaccggatgatcgattttctgccacggcgtcagcgccatggcagaggcggaggccgtcagggccaccaggcccaacatccagtttttcatggcgattaccagcgcggtacgtcggaaaccacatcaccgttttgcgcgcgctggcgcagcaggtgatccatcaacacgatcgccatcatcgcttcggcgatcggcacggcgcggatgcccacgcacggatcgtggcgaccacgggtgaccatttccaccgcttcgccctggcgattgatggtgcgccccggcaccataatgctggaggtcggcttcagcgccagatgcgcaatcaccggttggccgctgctgatgccgccgagaatgccgccggcatggttgctttggaagccttccggggtgatttcatcgcggttttcgctgccgcgtttggtcaccacggcgaacccgtcgccgatctccacgcctttcaccgcgttgatgctcatcagcgcgtgcgccagatcggcatcgaggcggtcaaacaccggctcacccaggccaaccggcacgttttcagcaatcacgctgaccttggcgccgatggagtcaccctcttttttcagcgcgcgcatcagttcgtccagcgcttccagcttgtccggatccgggcagaagaacgggttctgttcgacctgatcccagtctttcagctcgcaggtcacgtcgccgatctgcgccagatagccgcgcacctgcacgccgaacttctgctgcaggtatttcttggcgatagcacccgccgcgacgcgcatggcggtttcacgcgccgaagagcggccgccgccgcgatagtcgcgcagaccgtatttctgttcgtaggtgtagtcggcatgccctggacggaacacgtctttgatggcgctgtagtcttgcgagcgctgatcggtgttttcaatgatcagaccgatgctggtgccggtggtcacgccttcgaatacgccggagagaatgcgcacctgatccggttcacggcgctgggtggtgtaacgcgaggtgcccggacgacggcggtccagatcgtgttgcaaatcggcttcggtgagcgggatgccgggcggcacgccgtcgacgatacaacccagcgccaccccgtgagattcaccgaaggtggtgacgcggaaaatctgcccaatactgtttcctgccatcacggctccttaccgttagtcttttatcgttatgaggcccgccatgcgggccttggaaatgcggcttagctgcgatagaggctgaagtgttccttgcaatccaccagctgctgcttggtcagcatgaacacgccgtcgccgccgttttcgaattccagccaggtgaacgggatgtccggatattgttccatcagatgtaccatgctgttgcccacttcacaaatcagcacgccgtcgtcggtcaggtagtccggcgcgcacgccaggatgcggcgcaccagcttcaggccgtcgctgcccgccgccagccccagttccggctcaaagcggaactcctgcggcagatccgacatgtcttccgcatcgacgtacggcgggttggtgacgatcagatcgtactggatcgcgggaacgtcgcggaacagatcggaacggatcgggatcacctgatgttcgacgccgtgcgcctgaatattgcgctcggttaccgccagcacgtcgctggagatgtccaccgcgtccacttccgcttccgggaaagcgtagccgcaggcgatggcgatgcagccgctgccggtgcacatgtcgaggatatggcgcggcgggtgagggatcagcgcgctgaaacgatcgttgatcagctcgccgatcggtgaacgcggcaccagcacgcgctcgtcgacgtaaaattccatgccgcagaaccaggccttgttggtcagataggcgaccgggatgcgttcgttgacgcggcggatcacgcgctcaacgatgcgatggcgctcgctggaagtcagacgggcggtgtgcatgtcctccggaatgtccaacggcaggaacaggcttggcagcaccaattgcaccgcttcgtcccacggattatcggttccgtgaccataatagatattggcggcgttgaagcggcttaccgtccagcgcagcatatcttgaatggtgtgcagttcgttcactgcttcgtcgacgaaaattttgtccaatttgccctccggcaggcgctgtgtttcatgatttagccgcatagtttgccatgaagcccgcgacaaatcacgcttgcccctcgcgcttttcactctggcccgagttttgcgtcgacagcgctcattcacaaggtaaactagcgaaataaacgatttccggtgaatgaagcatgaagaacaagccccctctgagcaaagacgaacaacagctcttcagagagtcggtggcgggcgcgaaaaagctgcgccaggacaccatcgtccaccgcccgccgaagcccaaggtcaaacagattgcgccgcagcgattgctgcaggagcaggtcgatgccagctattatttttcagatgaataccagccgcagctggaagaggaaggcccgacgcgctacgtgcgccccggcagcagcccgtatgagctgaagaagctgcggcgcggcgattattcgccggagctgtttctcgatttgcacggcctgacccagctgcaggccaagcaggagctgggggcgctgatcgccgcctgcaaacgcgagcacgtgcactgcgcctgcgtgatgcacgggcacggcaagcatatcctcaagcagcaaacgccgctgtggctggcgcagcaccccgacgtgctggcgttccaccaggcgccgaaggaatggggtggcaacgccgccatcctgctgctggtggagctggccgagtaaccccccacagaaacgactcagggcgatgtcagacatcgccctgagtttattccgcaccgcatccgcggttcacactttggccatcacctgtgatgggctgacctgccattcaaacttgccgtagctgccgtccgccggcagatcgacgttggcgatcgccgaggtcgcgaacatcggcgggcactcgcccgggcacagttcggccaccagataccccaccagcggcaggtgcgacacgatcagcaccgagctcaccccttgcatcgccagcgcctgcagatagctgccgacctgttcggcgttgccgcccggcgtcagctcgggcagcacttcttcgccctccggcagcgtcaaggcttcacgcaccgtcgccagcgtctgttcggcccgcagataggggctgaccagcacgcgttcaatatccacagacttggtgttcaaccaggccgccatctgacgggactcgtcgcggccgcacagggtaaggggccttaccgcatcgctggctgcctcgagcgccgcctctccgtgacgcataatcaaaacttgcatattgcaccgctgttgttgacaaagtaacgctatacagaaacgccgtgcgtgctgtaccgccgagttttccaacccaaagccaaagctttaaaacgataacgcgccgtctctttatggcggccgggcattttgcctgaaagtttgcctaaagaaaacgctgttttttacagcaaccctcccctggcaaacctcgattgctcacagaacaatcaattcaacgggttaaattttaaccttgccgccatgaaatttattgatggcggtcaagctaacttaccgctgcctcagccttgctgtacagcctcaccggctgacgctgtcgcaaggagtgatggcgatcacaacgcggccctgttgcaactatagtgcaaatcgggccgccctgcgttcagctccccaacgggtaaaagcgctcgccctgctgcgccatgcgctgcaagcgctcgcacggcgcgaagtgctcgccgtgctgctggcgcaggtagtccagcgtcttcaccactttctcggcgccgagctcgtccatatagcggaacgggccgccgaggaacggcgggaaaccgatgccgaacaccgcaccgatatcgccgtcgcgcgcgctgcggatcacgccttcatccaggcagcgcgccgcttcgttcagcatcatcatcacgcagcgctgggcgacggtcgccggcagcatgtgcgccttcggcgtgacgccgagcaacgtatacaatgaggtatccgcgcgcttacgccgttgacgctgctgcccttcgctcgggtagagatagaagccgcggccgttcttgcgccctttgcgcccgtctttcagcaccgcatcgaacgcggccggcgcggcgaaacgcggccccagcgcctcgaccagcacgggaatgattttggtgccgacgtcgatgcccacttcatccagcagggtgatagggccgaccgggaagccgaagtccaccagcgctttgtccagcgattcaatgggctcgccttccagcaggcagcgcgccgcttcgttgatgtacggcgccaggatgcggttgacataaaaaccggcgctgtcgcccaccacgatggcggtcttgccctgcttgtgcgccagcgctacggtggtggcgatggtttgttcgctggtgccggcgtgcgggatcacttccaccagcggcattttatccaccgggctgaagtagtgcagaccgatcacctgctgcggccgctgggcctgttcggcgatgtggccgataggcagcgaagaggtgttggaggcgaacacggtatgcggcgcgcagttcgcttcgacctcggccaccattttctgcttcagcgccagatcctcaaacaccgcctcgaccacgatatccacctgctcgaagccggtgtaatcggtggagccggagatcaacatcatctgcttttgccgctccgccgggcgcatgcgcttgctgcgtacccgtttgccgagcacgtcccagctgtatttcagcgcatgattgatgccggtttcattgatgtctttgatgcgcaccggcaaaccgccgcgcgtggcggtgacacaggcgatgccgccgcccatcaggccgccgccgagaatgccgacgcgatgcagggcatgcggctgagcattgccgccccgctcttttttcagcgcggtggaggcgaagaacaggctgcgcaacgccgccgactgcggcgtcatcgccagctcgccaaaggcgcgcgcttcggcctcatagccgctggcgctgccgtgatccagcccggtgcgcaccacctgaataatgcgctccgccgccgggtagttgccgtgggttttcgccaacgttttcttgcgcacgatgctgaacagcagatttctgcccagcgggccgttgagcaggcgatcctgccacggcagctcgcgctgatgtttccagccctgtttcacccgctcgatggcggtctgcaacaggatcgattgcggcacggcgtcgtccaccagccccatgcgcagcgcctggcgggcgcgaatgtgcttgccggtcaggatcatgtccagcgccttggcggcgcctatcaggcgcggcaggcgctgagtgccgccagagcccggcagcaggcccagctgcacttccggcagaccgagcgcggttttgtcatccagcgaacagacgcggccgtggcaggccagcgccaattccagcccgccgcccaggcaggcgccgtggatggccgctaccaccggcaccgggaaagcggcgatctgcgccagcgtgctctgccctttcttggccagcgtttccgcctctttggcgctggtgcaggcggcgatcatggtgatgtcggcgccggcgataaacgagtccggcttgccggaaacgatcaccagcccttccagtgcagtgtgctgctgcgcccggatcagcacgtcgttcacctgttcgacgaactcggccttgagcgtattgaccttgtcgcccggcacgtcgatggtgatcaccccgatgttgtcggggcggatcgtcagttgaaaggccgacggtttggcgcgctgttcatgcaatgcgttttcgaaactcattattccacctccacgatcatcgcggcccctaacccgccggcggcgcaggcggtggtcaggcccagcccgccgccgcggcgtttcagctcacgcagcgtctgggtgatcatgcgcgcgccggtggcggcgaacgggtggccataggcgatggaaccgcccaggacgttgaatttgtccatgtccacctcgccgatcgcctggctgcggccaagcttctcgcgggcgaacgcttcgctggcgaacatcttcaggttagccagcgtttgcgcggcgaaagcttcatgcatatcgatgagcgtcagatcggccagaccgatgccggcgcgatccagcgccagcggcgtggcgtaggaaggccccaacagcatgtcttcccacacgtcgatggcggcgaaagcgaaactgcgcagatagccgagcggctgcaggcccagctctttggcgcgcgattcgctcatcatcagtaccgccgccgcgccgtcggtcaacggcgtgctgttggccgcggtgacgctgccgtgtttgcgatcgaacgccggtttcagcttggcgtaggacgccaggctggagtctttacggatgttgttgtcttcggaaagctgcgcgcggtatggcggcacgtaggcggtcatcacctcatcgcgcagccacccctcccgccaggccttggccgccagctcgtgggaacggtgcgccagcgcatcttgcgcttcacgggtgatgccgtggcttttcgccatctgttcggcggtatcgcccatgcgcaggccggtggaatactccgccaccgccggcggcaccggcatcagatcgcggaatttcagccggctgaacaatttgaggcgctgcgacagcgtacgcgccttgttgacgtccaccaacgtgcgcgccagcgccttgctgacgccgatcggcaagacggaagaagagtccgccccgccggcgatgccgacgctgatgctgccggccatgatgctctccgccacgttggcgatcgcctggaagctggtggcgcaggcgcgcgacacgctgtaagcgtcggtatggacgctcatgccggtgcccagcacgatttcacgcgcgatgttcggcgcctcgggcatttgcaccacctgaccgaacaccagctgctcgataagctgcggatcgataccgctgcgcgccaacagctcgctcaccgccgttttccctaaatccaccgccggaatgccgtgataggcggtcgcctgtttggcaaagggggtacgcagtccattcacaatcgcaatgcggtcaccatgacgggtcaccaacggcagtgccttactcataaatgctcctgaagaaaataacgtcagcgcaatgggcagaaagaggtctgacctgatgaggtcattgttaaccaaacggttacatttggcaaaccggcagagatcaaaactgcgagcaggcgcactttctatcgggaggggtacgggaaaggaaatccccggcgcataacaggcggcgccgggggcaaagccgggattaacgcaggccgagctggaagatcagagtttccgcctggcaggcgaaggtgaaatcggcctccaattgcacgccgccgtcaaccggtttaatgctactgctaatgtcacaagggtcggattcgaccgcgcgcgccttttcgctcagggccgccaacatcgcctccgcatcgtgttgattactgaacacctggctgtaggatgcggtgcaatcggtgttatccatcacggtgccgacatccacgcagcaacacgcggcggtttcctgggcgctgcatttattaattgcatctgacatgattggttctcctcaagggcctcggttatcagcccaaattgccgtttcactcaccggcacaaagccacaaaattctgcaggtattttacgcttccgcgccggcaatcactagcacttacttttactgggtgttttaagtgatggaaatcacaaataaaaatgagcgactgctaaggaatggtaagaattttgttatttaccgctggctttttgttaagcagatctcttttttgatatcaggttggaaatatttcaaaaacaaacttgcaacattttcacaggtcagacctatacttcagccactggtctgatttgtctgaacgataacggaccctacaatcccgcgctccttgttacttcgtgtaacaatagtttaaataataaacacataatgaggttttggtcatgagccagaaaaacctattgactaaatcagctctcgcagctgcagtggcaattatttcttcaaacgtgtctgccgcaggattccagctgaatgagttctcatcagctggtttaggacgttcgtattctggcgaaggcgccatggcggatacggcggcccccgcaagccgcaacccggcgttgctgatgatgtatacccgcccggaactctctttcggcgcagtcttcatcgatccggacgtcgatatcagtggccaatccccttccggcgccagtctggatgcgaaaaacatcgcgccgaccgcctgggtgccgaacctgcattatgttcacccgattaacgatcaattcgccgtaggcggctcggtcaccagcaacttcggtttggcgaccgaatacaacgacggttacgcggcgggttccatgggcggcaaaaccgacctggaaaccttgaaccttaacctgagcggcgcttatcgcctgaacaagaacttcagcttcggtctgggctttgacgccgtttatgccaaggccaaactcgagcgctatgccggcgatctgccaaaactgatcgccggatcgggccagttaccgccgcagttggccggcccggtttcgcagatcccggcagatacccagatttcgcacctgaaaggcgacgaatggggcttcggctggaacgccggtattctgtacgaagtggatgaaaacaaccgttacggcttcacctatcgctcagaagtgaaaatcgactttgacggcgattacaaaagcagcctgccttcagccttcaacccgttgctggcctctaaaggtctgccgtggggcaccaacggcaccaccattccgggttctctgagcctgcacctgccggaaatgtgggaactgtccggctacaacaaagtggcgccgcagtgggctatccactacagcctggcctacaccagctggagccagttccaggagctgaaagccaccggcaacaacggccagacgctgttccagaagcatgaaggcttcaaagacgcttaccgcatcgcgctgggcaccacctacttctacgacgataactggaccttccgtaccggtatcgccttcgatgacagcccggtgcctgcccaaaaccgttcgatctccattccggatcaggaccgtttctggctgagtgccggtaccacctatgcgttcaacaaagacgcctcggttgacgtcggcgtgtcctacatgcacggccagaaagtcaccatcaatgaaggtccttacaccttcacctccgaaggcaaggcctggctgtacggcgccaacttcaactaccgcttctaatctcgcctgagatggatgccaaagcgccccgcggggcgctttttctttgcctgtcgctcgccgcgggcgtaaaaaaacccgccagacggcgggttttcattggcataaggccggcggttactgcgagtcgatctcgtccagatcgccctgaatcgccttggcgttcgggttctcttccggcttgagcgaaccgccgttggcgatgaagtcgtggcgctggaagtaagcttcgcgcaccatgacataaggatcggaggagttgcgcagcaggccgtcggaatccagcagttgagcgcgggtttcgataccctcgaccacccatttgcccgccgacatccagaaagtcaggtagctcagcatcggatacagcgtatccgcaaagtcgccgccgtcttcacgcagcgtgaagctgccgtagcccggcagcatcacgtacggaccgtagcccacatcgtaatgccccaacgtgctgccgaaacggttcggctcttcgcgcgccagtttcgggttggccatgccggccacgtcgatcaggccgcccatcccgagcagggtgttcaggaagaaacggttgaagtggatcatcccgcggtagggatcgcccttcaggaaggcgttgaccatgctggccggctcttccaggttagaggtgaagttgctgatgccgttacgcgccggcatcggcacgtagtcgcgccaggccaccgcgaccggacgcaggatataaggatccaggacgttgtagttgaagtcgaacatcgtccggttaaatccttccagcggatcggaacgcccttgcggatcgttgtctggcgcgctggcacagcccaccagtaataccgttgcgaatgccaccccagtcaggcgaaagttcatatttttctccataaaaacacgttcggtcttatttttcagggacctgcttgtttatctgaacgctaacctgctctttaccgctgaatgtctgcagcgagctttcgccgaaccagtcccccggctgcggcgtggccaatccgtcctgtgagaggcgcacacgcacctgcacctgatgctgcgccgagagcagacgctcgggcatcatggcgttgctgtcatccagtgagaaagacagcggaaaacggctcagcggcaattgttttaccgcgaccggcaccgggctgacgccgtcggtgaccgaaatgaccagcgtcccctgcggcggcatggctttcgccgcctgcggtgacagcgcaacggtcacattcagtttaacattttctccgcctgcctgggcttttgcttgtgcaatactgcgctttatcacttccgcgcgcggatcgttggccggcagcagctgcagcatcacctgccaggcgccgatcgcctgcttgaaatcgccctgttcgaaggcattgaacgccagcaggctcagcacccgcggatcgccgtggttttccgcgatcatgcgccgcaacagctgcgccgcctgcttgttatcctccggatcgttggagcgcgtcaagacctcggcatagccgagccgcacttccagactattcggatccaattgataagcatgagcaaacgcctgcgtagcggtggtggcattattcagcgccatgccgacgcgccccagcatcatccagtcactgatgttgcgatcgtcctgttgcagcgcggtgcgcagccccagcccgaggcgagcaatctcttccatgctcagcggtttggcgcgctcattggcaacgcgctcgcgcaattccggcatttgcgcctgcaccagacgccagtccagcacctgcgccagcccgccggttttcagataaaagccaacggtcaccgccagcagtaacagcacgcccggcaccagcgcccagcggttgatcggcttcgcctgcgccatctgctcggccgggatgtcgttcaacaggttctgttgcagctctttgaccagttccgggcgctcggccaccacgccctgctgctcatcctgctccaactcgctgaggcgatcctgataaaacgccttgttcagcgcatcgcgcgtggcggcgctctgcttgccgcggcgcatcgccggcaccaccagcaacgcggcagcgccggccagcaacacgcaaataatcagccaaaaagccattagggtttcttcctgtcagtctcttgcaacagcgccgccaggcgctgccgttcccgttcggagaatgcatcgtccaccgccgcgtcgggcttgcgacgggtgcgcaggatcaccactgccccgccgatcaatacgaacagcagcgggccgatccacaagatcagcgtcgccggcgttaccggcggctcgtaggtgacgaagttgccataacgcgccaccatgtaatcgatgatctgctgcttgctttgcccctgcatcatcagctcgtacaccttggtgcgcatgtcggcggcgataatggcgttggaatcggcaatgctgttgttttggcatttcgggcagcgcagctgttcggtcaactcgcgatactgctgctcctgctcgacggagttgaagcgataggtatcgatcgccgcggcggcgctccagctcagcagcgcggcgcacagcagaacaatcagcctcatgcctcacccccgtactttttatacagcggcagcacttcctgctgccagacgcgctcattcatgtcgccggcgtggcgatagcgaataatcccctggccgtcgataaggaaggtctcaggcgcgccgtacaccccgagatccaaccccagcatgccgtcgccgtcgtacagactgagggcgtagggattgccgagagagttgagccaggtcaccgccttggcgcgatcgtctttgtagttcaggccgaccacccgtacgccgcgcgccgccagcgtattgagatactgatgttccgcgcggcaggttgggcaccaggtggcccagacgttgagcaagatcggcttgccgtcgcgcagcaccgcctgatcgtaggttttgccaggctgatccaacgattccagcctgaaggtcggcaccggcttaccgatcagcgccgactccagcatggtcggatcttcgccgcccgcgttgcgcgtgagctgcaccatcagagccgccaccagcagcaggaagagcaccaacgggataaacagcagcttacgcttcatgattgcgcctccagtttgccttcacgcttgagctttttgctcatgcgataacgcgggtcgagaatgcacagcaggccgccgatcgccataaagacaccgccgaaccagatccagcgcacgaagggtttgtaatacaggcgcaccgcccaggaaccgtcttccagctcctcgcccagcgccgcgtacagatcgcggctgaacccgccgtcgatcgccgcctcggtcatcatgctgcgcgccacgctgtagtagcgtttctccgcgtgcaacgtcgcctccggcttgccgttgcgcgtgacgtcgatgatgccgacgccgccgctgtagttcgggccgcgaatgtcgtgcacgtcgcggaacacgaagtgatagttgtggatatccacactgtcgccggccttcatccgcacgtcgcgctccacgctgtaattctggctgaaggcgatgccgattaccgtcaccgccacgccgaggtggccgagcaccatgccccagtggctgcgagacagctgccgcagaccgcgccagaaaccgtggcggtgggtggcgcgctcatgcagctccatcagcgtcaggatgatcacccacagcgccataatcaggcccaccaccgtcatgccggcgatgctgtcctgcagcaaccacggcagcagaatcgacagcaccagcgtcgccagcagcgccacgccgaggcggcgccacagtttgcccggctcatcgcggcgccagcgcaccagcggcccgatgcccaacagcagcgccagcggcgccatcagccaggtgaacatggtgttgaagaacggctcgccgatcgagatgctgcccagccccagctgtttgtgcaccagcggcagcagcgtgcccaacagcaccaccagcatggcggcgatcagcagcacgttgttgcccagcaggaaggtctcgcgcgagaaggtctcgtgctgcacccggctgcgcacctggccgcccttgaccgcgtacagcagcagcgaaccgccgatgacgatcaccagataggcgagaataaacatgccgcgcgccggatcggaggcgaaagagtgcaccgagaccagcacgccggagcgcaccaggaaggtgcccagcaggcacagcgagaaagcggtgatcgccagcaacaccgtccaggctttgaacgtgccgcgtttctcggtcaccgccagcgaatgcatcagcgcggtgccggccagccacggcataaaggaggcgttctccaccggatcccagaaccaccaaccgccccagcccagctcatagtaggcccaggccgatccgagcacgatgcccagcgtgaggaacacccaggcggcggtggtccacgggcgtgaccagcgcgcccaggcggtgtcgagccggccggccatcagcgaggcgatggcgaacgcgaaggcgaccgagaagccgacatagcccatgtacagcagcggcgggtggaagatcaggccgatatcctgcagcagcgggttgagatcgctgccgtcgatcgggaagttcggcagcgtgcgggtgaacggattggaggtcatgatgatgaacagcaggaaaccggcggtgatcatccccatcaccgacagcacccgcgccaccgcatcctgcggcatcgcccggctgcacaacgccaccgccagcgaccagcagctcagcagcagcacccacagcagcagcgaaccttcatgcgccccccaggtggcggcgatgcggtaatacaccggcagttgggtattggagttggtggccacgtaggcgacggtaaaatcgttgaccacgaaagcatgcaccaggcacaggaacgccagcgcaatcgccgcgaacatgccataggtcagcggccgagccaccgccatcatgcggctgtcctggcgcgccgcgccccactgcgggtaaatactcagcagcagcgcgatcgccagcgccaggcacagcagaaaactgcccagttccggcatcatgacttggcgccctccgcctgcggcgcgttatacgcttccgccggccctttgtgattctctttcatcgcgtcggccacttccggcggcgtgtatttctcgtcgtgtttggccagcacttcgcgcgcattgaccacgttgccctcgcccagcaccccttgcgccaccacgccctgcccttcacggaacagatccggcagaatgccggtgtaggttacgccgatcgcgccacgcgcgtcgtaaatcttgaagctgacctgcagcgtattgggatcgcgtttcaccgagccgggcatcaccatgccgccgatgcgcagccgttggccgacctcgggcttctcgtggttttcgcccttgccctgcaggatttcccccggggtatagaacagatcgatgttggagcgcagcgcgtacagcatcagggttgcggtcagcgcgatgccgatcagcacaacgatcgccagataaaggcggcttttacgacgtggattcacaatgatttctcccgcggtgcggcggatttttgttttgactgttgcgcatggcgaatgcgccgttcgcgcgcctgacggcgaccgatctcggcgagcaactgccgccgctgccagacggtgtgcgccaccagccccaacagcgaaatcagcgtggcggcgaccgccagccagacataaaaggcataaccgcccatggcgaaaaacgccgaccaggaatcgaatgcggcattcatgactgacgctccttattcaccagcccggcgacccacgggcgctggcgctcctggaacaggatcagattgcgcaggcgcatcagcgtcagcgtgacgaacaacagcagatagccgaggatcgcccagcgcagcggggtgcgcatgcttggcgcgatggattgctgcatattggtcgaaccctgatgcaacgtattccaccattcgacggagaaatggatgatcgggatattcaccacgcccaccagcaccagaatgccggcggcgcggcccgccaggcggcggtcttcgaaggcgttatacaacgcgatgacgcccatatagaggaacagcagcaccagttcggaagtcagacgcgcgtcccacacccaccaggtgccccacatcggcttaccccaggcggagccggtcaccagcgcgataaaggtgaacaccgcgccgatcggcgccatcgccgccaccacggtatcggacattttcatctgccacaccaagccgataaacgccgccaccgccatcgaggcgtagatgcccatcgaccacatggccgccggcacgtgaatataaatgatgcggaagctgtcgccctgctgataatccttcggcgcgaagccaaagccccatgcccagccaagcagcaggcaggccgccgccgccagccccagccaggggataaagcggccgcagacgtgatacagccgttcaggccgcgccagttgatgtaaccatttccacattgtcgtcagtgctcacggtaatttttatgcgtcggccgcctcgagcgttcgaaacggcgaaaatcttctgcggggtacgctcttgccggccttgccccgtctgttcattcaatttgttagctagtgcacgctcactcgcagcgccgctgcggcggcaaacggcgccaatgtcacgctgcccgccagcatcgcgccgagtatcgccaggtaaccatcaatcggcatacccatcgcggcggcgtcgatcgcgccggtggcgaagatcagcaccgggatatacagcggcagcaccagcaggctgagcagcacgccccctttgcgcaggccgacggtcagccccacgccgatagcgccgatcaggctcagcgtcggcgtgccgagcagcagcgtccccgccatcgccagccaggtttgcatatcaagcgacaacagcagcgccaccagcggcgacaggatcagcagcggcaatcccgtcacgacccagtgagcacacacttttcccagcaccgtcatcggcagcggcgtcggcagcagcaacagctgctccagcgagccatcgaggaaatcgtcgcgaaacagccgctccagcgacagcagcgaggccagcagcgccgccacccacacgatgcccggcgcaatgcgcgccagcagctgcggttcagggccaatccccagcgggaacagcgtgatcacaatcaggaaaaaccacagcgggttgacgatctccgaccctttacggcaggcgatcttcaattcgcgacgcaccagagtcaaaaacatcacaaactccccgcgtcgtgttccgccaaacgaattttgcccaccgtttggctgacgccggccaaatcctgatgcgtggtcaacaataccatgccgccccgctgcgcatgttgttcaaaaaggctaatcaactcggccacgccctgtttatcgattgccgtcaacggttcatcgaggatccacagcggcgccgcgctgagccacaatcgcgccagcgccacccgtcgctgctgcccggccgaaagctgcgccaccggcagatcttcgtaccccaccaaccccacctgctccaacgcgcgccagatggcctgatgctcggccgcgccgcgcaccgcctgataaaactgcagattttcgaagggtgtcaatacggctttgatgcccggttgatggccgataaacagcaaatcttgctgatacgccgcgcgatcgcgcagcgtgttgcgcccgcgccagcacacctcaccgccgtccggccgcgccagaccggcgaggatgcgcagcaaactggtcttgcccgcgccgttcggcccttctacctgaatgatatcgcccggctgaactgaaaagcttagctcgctaaacaggatgcgttcatcgcgcacgcaactcagacttttggcttccagcatcggggaactcatatttttctttgggatagcgaatcatagcataagcctttccccacacgcagcctgcggcgggcgcgccggggggccaatatggcgagcaggatcaagaatgcgcggaaaaaagcggcggattttaactcttgttacctttttctgtatttcgccgcatttaggctgggcaactacgcttaatgacgtgacctcacccttattgagcaggagcgacagcatgaacgaacagcaacgccaggagcacgagcaggatgagacgatgcgggtagagagcgaagagcaggaacagggcaagcgcgaaatcgaagtcagggaagaaaatctgccgtcgcgcgcggcggcggtgcatgaacagatccggatggaaggcgaaaaagagctggagcgcgacgggctggcattgctgtggtcggcgatcgccgccgggctgtcgatgggcgcctcgctggcggcgaagggcattttccacgcccgcctgccggacgatcccagccgtttcttcctcgagaacctcggctacaccttcggttttatcattgtcatcatggcgcgccaacagctgtttaccgaaaataccgtcacggcggtattgcccatcatgcataaacccacgccgcgcaacctgctgatcctgctgcgtctgtggggcgtggtgctgctcggcaacctgatcggcaccgggctggcggcgctggcgtttacccatatgccgctgttcgacgccgggacgcgcggcgccttcatcagcctgggcgaagaggtgatgcgccatacgccgggagaaatgttcgccaacggcatcctggccggctggatcatcgccaccatggtgtggatgatcccggccgccggcgcggcgaaaatctgggtgatcgtcctgatgacctacctggtagcgatttgcgatttgacccatatcgtggtcggttcggtagagatcctctatctggtgttcaacggcgcgattgggtggcaggaattcgtctatccgttcgccctgccaacgctggcgggcaacatcatcggcggcacctttatctttgcgttgataagccatgcgcagatccgcaacgatttgagcgcccaaaaacggacggagcggcagcaagaggaaaaacggcgccacggcggggaaaaaccgtgatcgccgtcggtcaggcgaggaaatttcggcgctaactggcgaggtattgagcaaacgcaccgctaagcgcttattctgcgggtaaaaaaaggtataatgccccggcagcttcggttgccagcccgcagcgtccccgtagttaaacggatataacaagcccctcctaagggctagttactggttcgattccagtcggggacaccattatttattatcaagccattccccatcatcggcacccgcaatcccccttctccacgcctcagatccgatttcccccgcgcgttatgatgggcgttaattaaaaaacttaatatccgtcggcgtagcaatcgtcgccgcctcgcctctggccttcaactcgcccgtctcatcatcgaaatcgaacagcgtaacggtattggtgaacacattcgtgacataaagatggttgccggtggcatcgaaagcgagcgcacgcggttcaatgccgccggcctcatagcgcctcgtctcccctggcagcccatccccaccaatttttaatatcagcaaatggttatcggcaccgcgattggtggcaataagatatctgccgctcgggctgaggataatggctccgccgcttttcgcctccgctgaatcctgcccgccgttcagtttcactttcccttgttgcgtcaatcgatggtcgctgacggtaaacacctcgatttcacccgccatttcggtgatgacataggcatactcgcctttcggcgagaacaccatgtgccttgggccggcgcctggcgcaaagctgacatcgcgcgatgcgtccgcctgcagcggctgtgcgctatccgagcgatagcgataggcgtgcagcttgtccccgccgagatccgccgcatacagatatttaccatcgcggctgaaggtggttgagtgcgcatggcccccttcctgacgcccctgcacggcgccagaacctgatataaacggataatgctgcacctgttcacccagtttgccgtcactgccaattggcaataccgtcatccccgcgccgcctttggcgacggagtagttggcgacaaacagaaacttgccatccggactgagggtggcatgcgtcggctgctggcccgcactgctcaccgtattcagcacccgcacgctgccggcttcgtctattgccaaggcggtcaccgttcccgcgttctcctcattggtggcataggcgaaacggccatcgcgagattttacgatccacgatgggctgttcattttaaccacgtcgagcagcgttaacgtgccgtcgccattaaccgccaggcgatagagcccttcactgggtcttgccggtttctgcaccgcaggcgcattcggaatatgggtccaggtaccgactaacgctatttgctgatgttcccgattattggccatcgcatttcctgaaaacatgagagaaattaacaccgcagttaattgaatggcttgccagcctgagccggcaacgattgttcgaccaagttcagacaatatagaaggtagcataaagcgagctggatggcgcttattaatcgagtcgagagttttttctctattcatgatatcttcttgcctcatcactatgtcacaggaataagtatatcgacattgacaaccttgccatttagatcctcttgcctatataactctataaaaaagctctccctcattttgacattgatggcaggcagataagcgtcatacattacatcgaaaaagtcaatatattctgaaagctcccccgtaaaggggatgacaatatatttacccatagggatatagaagttaaagatggaatgaaaaacctcttgccccttgctgttggaatgccatttattactcctgttcttttccacattacatcccccccgctgcttgcttaaccatttttcattggtccgtgcaatgtcgccggtatctctgaattttcttatagaatgaaaaatcagtgatttgtaatgctttaacatctcaatgtcatccggcatgaccgtgtggtagaagtaaggtttcttatcgttgccatacggcgggatctgcgtggaaaaatcccatccccggctgtttctaaagctgttgggcgtttcgccaaagaaacgtttgaatgcccgcgtgtaacattgctgagaggcaaacccggatgccagggcgacatccaatatgttcccttggtgctgtttgagcagaatagcagagcgactcagttttctattccttatataagtccctaacgttataccaaaataatgcttaaacagccgttgcaaatgccatttagagtaacctgagataatggaaaccttttcaactgtcagcccctcgacaatattcttttccatatactccaacacctgcaaaagaatatcttttctgtaatccatatgtgctccttgcttttataagattcgcgtcctttttattaaaatcgttaaccaaccaaaccaagtcattaagattaatcctaaaaaaaaccagcctgtcaattcatttttttcggcataggaaaaactatcgcataaataactgaaaatgatcatgttatataaatctctccgcaagaaacccataaaacaaaatcaactcgcgtaaagtgcactcatcaaagatgcacttgccacaccaggcagaatcacactttttgataattgttttaccttaaagtgttttttacagccagattgcatggccgaataggaatttcatcatcacaaatgaaaacgcattttatatgcctggcccgccgataaaacgtactgcgaaagagatataaagtatgaccgacagtaaaagaagacgggagggataagctcaaggctgaacatcggtctcaataatctcgcgtcgcgatagcgcgtttcttttttatcgttcctgcgcagagaaaacggatattttaacaaaccttgctcgatgccctgttttacaaaccgcgcccattgggaaccctgcctactcccatgaatcgcccatctctcccccggtaaaatgccgagccgactcgcccgcgccttgttgtcagaacggcctgcggccgcaaacaaaaagcccagcacgcgaggctgggcttttcattaacggcctgattaatcagccaggttgtcgatctctgcggacctgtgcttgcgcaacaggtacagcagcaaagatacccgccgctcggtgcgttccggggtatccggcggcaggttgtagcgcaaggtataacgctcgttgttctcgttgcagaaatcgatgacgagcacgggagcagaggcccccgctacttttcgataattcagcgagatgcacgacaggttttttttcatctcaacttaccgcgacagtgcggcgggttgattcggcaatccgccccacgccggcgctcaacgcagcgcccaacagcagcaccaacagcgaaccccacgcggcgcgagacagctgtttggccgcttcatcggccgcttcacgcgctttctgctcagcctcggccttgagtttttccaccttctgcgccgcctgctggtaagcctgggcgtagttatcgacgatttggctcgcttcatcgcggctcttgccggtgcgtgccgcaacgatattcaccagcgcgtccttatcggcggcgctcaacgccggctcaccggactgcttgacgcgctcgaaccactgcttaagctcggtggcggactgcgccggatcggccgcggcatccacggccgactgtttgccgtcggcggccgcccgattggctctctgctccaaccgagcaggatccagctccggcttaccggtctgcttaagggtggcgttcaactgattttccaggcttccccagtcaaggctgatgccctttttatccagctgttgcttgaggccttcgcctacgtttggcgctgccgccgccaggccgctgcctgccagcgaaagccctttacccaccgcgcttcccgccagccccactacgccgctcgccaatgaaaccatcagccaggtggtcaacaaggtggtgatcgcccagctcagcaagccatgcaagccgccgcgattcggtgcggagcggccggcgacgaacgcgcctgcggccagcgatgccaacgttgaaaccagcagccagatcccggtgccggtgccaaagccgctcagcgggttgcccttttgcatcatatccacggcctgggcaccaatagccgtgcccagcacgctgaaggtcagataagtcaccagcgccacggcactcccggccaatatcgagccccatgacacctgaaacgctaagcgatttgattcatagacagtggtcatcgttgttccttatattttctggacaagtgattgcacgcacggcgggtaaccgcgcagacaaattcagtctgccgcgcggcgtcgtcggccgtcccggttcatttgcatcagaatgcctggtgcatttataccctgcgaatacgcacgttatgcactaagctgctcagcgaatagcgtaacccgcggccgccttaagaggccgcccccttctgtctagcggagaacacatgagccaatccgttttggccagcgaaacccaccgcggccacctgcagcaaatcatctccggcttgtccgacggcgtgatcctgacggataccgatcaaaccttgctatgggccaacgaggccgcgttgaccatgcatggcgtgagtcatcagaaagctctgggggccaatgccggcgagtacgcggcgcgttttgccctgcgctatcgcaacaatcatccgctggttttggaacagtacccgctgaaccgggttgccgaaggcgaaaccttcaccgatgtggtggtggaggttcggcaggtcgacgatccggacagcttctgggtgcaccgcctgcggagcctgattatcaccgatgcgcaggggcaaccggagctgctggcactgatcctgagcgacgcgacggagtgggccagcgccgaacagcgctttgaaaaaaccttcaacgccaatccggcaccggcagtcatttgtcggctaagcgacctgcgttacgtcaaggtcaaccaggggttccttgatatgaccggttaccaacgtgaacaggtcatggggcgttcggtttatgaactcgacgttttggaacaggcggagcacaaagaactggccgttcagcgcctgggggaaggcgctaccattccgcagatggaggccgagctgaagctgcccggcggcggaagcaagctggtggtggttgccggccaacccttggatatcaatgaagacgactgcatgctgttcacgtttaccgatctcgaaccccggcgccaggcggaatcggcgctgcgagaaagtgaagaacggtttgccaaggcatttcgcctgagccctgtgccgacgttgttatgtaccgcgcacgagcggcgcgtgctggatgtcaacgaagccttcacccgcaccaccgagtacgacgccgaagacttgatcggcaagacggtcggagagatcccgtttattgacgatccggaggcgaaccgccgtttgtttgccgccctggaaaaaagcggcaacgtcgaagggctggacatccgggtgcgcaagaaagggagcgagtcgattgactgtgtggcctcggcggatgccgtcagcatccacaatgcgccctgttatctgctggtgctcatggacattaccgaacgcaaacgctcggagctggagctggtaagcgccatcgaagaagtgatgcaggacgcctcctggttcagccaaaccctgatcgaaaaattggccaacgtgaaaagcatcaaccggcccgaccaggctggatttaccgccagcgatctcacgccgcgcgagcgcgatgtgctggaattgatttgcgaggggctgccggacaagaaaatcgcggcgcgtctcaatctggcgctcaacaccatccgcaaccatgtcgcgacggtctattccaaactcggcgtgcatagccgcagcgaagccatcgtctgggccagagaacgcgggctgtttaccggtgggctggccttcaggaatggcaagtagcctgcaaatgcactacccaaaccgatgcaaacgccccttataggccaaaagtgaagtgcataacatggcggtgcaaatgcaggcttccgtcctgtgcggaagccaaacggatcgaaccttaggagcgcatcacaatgaacagcgaaaaagccaatggcatgatggaaaaagtggcgggcaaggcgcaggaaatcgcgggcgacgtcaccggcaacgaacgtttgcaggccgaaggcgccgcgcgccaggcagcgggcgtgctgcaagaaaaatacggcgatgccctgagctgcgccggcaacatgatgaagaaaaaccccctcgccgcattggccctcattgccggcgcaggcctgttgaccggcctgctgctgcgccgccgttgatgcgcgccggcgaacaaaccgcttttccctgaatgccgcgcccggtgggtagccaccgggcgcggttctatcggcctgagggacgcagtattatcgattgatgcctccgctcgtttaccgctggaattaacgcgtattctgtgtcgccatgcgacgaattattgcggtgaaaccgctatatcccgcagggaacatgagcctttatcgttcaggctgccgcacaccgtctttactcgctgcttataccgcacgtctttttattatattcgtcctattgcagattatcatcaccctctcactcaacgcgcccaccgcctgttatttccggttgttatgcaagccagttaattcccctgcaacataacgatatttctcagcgtaaaaactgaatatatcaatcagcctgggtttatcctccgcgccattaaatgttaatattgccggattatgcgcatggagaaatagcatgttccccagtaaaaaacattcgcagcgggcgaccccgctgaccagctatcaattttcccggctgcatactttcgaatgcgtcgcccgtcatttatcttttgcgctggcggcgcaagaattgtcgatcacccccagcgccgtgagccaccgcattaatttgctcgaaaaggaattgggttttctgctattccaacgctttcatcgccggattacgctgacgccggagggcgaacgcatgcaatgggcgctggacagttccttcaacaccttgaatcaagaaattctggacatcaaaaatcgcgagttgacggggaccttgaccctctactcgcacccatccctggtgcaatgtctgctgctgccgcgcatcggcgactttatcgcccagcaccccaccattcacctcaatattctgaccgggcaggaaatcatcaacctggccaaccgcggcgtggatctggcgatgtacttcggcaaactgccctcggggcggcatctggacgaagcctttatgcaggaatcaatggtgccgatctgcacgccgcagtacgccgccacgcataacctgtacgatgcgccggaaaacctggccctctgcacgctgctgcacgatcgctacaactccggcgaagatgagtggcaaacctggtcgcaacactttgcgctggggctggataccgacagtaaaagcatggagttcgaccgttccgatcttgcagtgctggccgcgacgcgacaccttggcgtcgccatggggcggctcaatctggtgcaggactggatcaaaagcggcgaactgatcattccgttcaccgacatgaccgtgccctgcgagcactgctattttacctcgaccatctccgagcggcagtggccgaagatcctcgcgtttaagcagtggatcatgaaaatctcccctctggtctgatggccagaggattatcgccatactttgggggaataagaaaaatgcagcgcgcaggcgtagagccggccggcctttgaataagagatatttttgcggtttttatcccaggtcagcagagaattattggcaaaataataaacctccaattgcatcccattagccaacctcgaccaacctcggcttcttatcacggtaaaatcaccgttatcgctgagcgtaatcagcggcacgccccaggcatagcgggatatttgcagctgaataatgaattggctttcgcagcttatttggtagttctgtacatcaacatccataatttatatttttggtgccacccttcggtcaacataaataagatatgaacaactcactacgactaaccccagtacgatcaacacagcacccaatacaaattcaatttgcaacggttcgccgagaatgacggcccccgccaggatgccgaataccggcgtcataaaggtgagaatgcccagcgaggaagcctgataacggcgcaacaatgaaaaccagatcaggtagctgaaaaacgacacgatcaccgtttggaacaacaggctgctccacgccacggggctcaggacgacgtgcaaattgtccgtagccagcgccagcagcgacagcagcacacaggcgcccgtcaactggaacagcagcgtctgtttggccgggcactccgccaggcgcgtggtacggatcaccagggtagaaccgccccaggcgatccccgccagcaggccatagaaatcgcctttcagccgatcggtcccgccgctgccctcggccatgcccgatatggccagcaccacaccgccaaaggcgatgagcatgcccagccactgcaccggcgacagacgctcctgacgattcaggaaatgcaggccaagggcagaaaacagcggcgcggtgtacaaaaacaccgccatatgcgaggcgctggtatagcgcagcccttcggagacaaaaaagaactccagcgcgaacaatgctcccacgctcagaccggcgctcagcgtggcgcgatcccaggtgaaacactcgccgcggcaacgcgccaacaggtatacccccagcgcggcgagccccgaacgaatggcaatttgcagcaccgccgacacatccgcctcggcagccttgatcgccacctgctgcattccccagatagcgcaaagcatcaccatggcggcggcagccctgccgtcaataccgattcttgcattcataatagggttctcgtcgccgttgaaataataacaggctgccgtcgcgttattctttatacaccacgatttcctgataaagtttaataacctcgccgtcgctgtcgacagagtcggtatattcagtttgctgcgccaaatgaatcaccttccatcctttgcgcgccagttccgggatcgtcaggcgccccacgccgcggcaggaaaacagggtgtcgtcagacaatctgagcttactaacctctgcataatcataagcttgagaatgacaaacgtgcgattccgccgccatcgccggtaatgaaaacagccccaccaacaacattaacagattcctcatggcgacctcccaatcgcttattcctgccgaccgattacgcagaaagcggctaacgttaatacggcggtgacaggctttaattaattatctcttgcacggataaaattacaggctgacgccgatgactgacaaatgaaaaatataaaccttggcgttagatgaattcatccgaatcgaaaggcatgaaaagcggcccttttcaccgcacgaaatggtcaaaaaccggccaataattagcaagaaaagtaattatttattttaccgtttatgttacaaatgccgcccgccgctaaaacaccaaaaaaaccgtcaaaatgcgtgaaaacgcagcgttctgcgcaaaacatcggcatggcggcgctgatgggggcggtcatacataaaacagggataacacatggcaatgaaattgcgcgtattgactcaagcggtggcgctgggtctggcgatcggcagcgcgtcgttcgccgctcaggcggaaatcaccctgctgaagcaggatccgcaggctggcgatccgctcagccgcctgaacttcaccgttggcggcagtatccgtccgcagttcaacaacatgacgggcgacggtgacaagggctcctacaagcgtaacggcttcgacggcggcacccgcttccgcttcgcggcggactactacctgttcgacgatatcagctggatcagctactacgagctgggcgtgaacattccggcgctgttcgactgggatcaccactatgccgacggcgcgagaaacaccagccgccgcatgctgtacaccggcctgaaaagcaacacctggggccagatgaccttcggtcaacagaacagcgtttattatgacgtggtgggcgccaaaaccgatatctgggactacgacatgctggcccaggcaccgggcaacggcatcaacggtgactacgacggctcttaccgctcacgcaaaatgctgaagtacaagaaccgcttcggcgatgcggacgtttacgcttcgtacctgttcagcgacagcgactatctgccgggcaacggcctgcgctacaagcgcaaaggcggcggctcactgggcgtggattaccacattacgccggacctgacctggggcaccgcctggaactacacccgcgccgaaatgcgtaatccgtccaccagcggcagcaagagctatgaccagaacattttcggtaccgccatcagttggaaaccggacaactggaccctcaccttcggcggcggttactacaacgacttcctgaccaccaagaaagccgacatcaataattacttcgccggcgacgcatggggtatcgaatacctggccggttataccgtgccggttggccagtacgcggtgaaatcggtgatgccgtacttcatgggcgaccgcctggaatacatcaccggccgcaactaccagcgcatcgacaacggcctcggggttaccgtgcagtttgactacggtttccgcgttgacgtggagcacgtgctgacatcgagcaccgacaacctcggcgatatgaccgtggtgcgcctgcgctacgatttctgattgctcagaacgcaaaaaaggccgcgcaagcggcctttttcgtttattgacgcagcgtcagaagccgccgcgcgccgagcgcccgaccgcctcgcccagctgccataccgccatggcgtaatgggtgctgtggttatagcgggtgatgacgtagaagttcggcaggccataccaatactggtagccggtgccgatgtccagccgcagcaggctggcttcctgattatcgccgagcgagccctgcgggcttaggccggcttccgccagcgcggcaaccgagtagcgcgtcttgaagccgttttccagccccggtgcctggccgttggcctgaatggcgaccggttcgcctttggaccagccgtgcgccttgaagtaattggccacgctgccgatggcatcgaccggatcccacaggttgatatgcccatcgccgttgaagtcgaccgcatagcttttgaaggaagaaggcatgaactgcccatagcccatcgcgccggcaaaggagccgcgcagttcgagcggatcgtcgccttcggtgcgcgacatcagcaggaaggtttccagctcaccggcgaagtaatcggcgcggcgcgggtagttgaaggccaacgtcgccagcgcgtcgataatgcgggttttacccattacgcggccccagcgggtctccacgccgataatccccacgatgatctccggcggcacgccgtacacctgccaggcacgctgcagcgcatcctgatattgattccagaacaccacgccgttttgcacgttatccggggtgatgaacttgttgcggtagcgcagccaggagccattcggcccggttggcccctgggtagacggcgtcggcgcctgcctgtccatcagccgcagcaccgaatccaaacgccgtgcctgcgccagcacgtcgtgcagctgctgccgatcaaagccgtgttcctgcaccatcttatcgataaagcgcgcggtattcgggttattggcgaaatccccccccagcggcgcgccgctgtgcgccgggctcagcaaaaagccgccctttaccggggtgctctgcggcgtagcggtggtactgggtttcggcgtgctgctacaggcagcaagcaaggtaatcagcggtaaaagcgcaaccaggtgacgcatcggatatccatatagccatgcaagagataagtgggagttatgttaatgcattgttcaacgcgaacaaacaggattatgccgccaattaccgcgccaggtagccaaacgtgccaaattgtgacgttttgcacggtgaagggacgcccgatgcggccgcgtggaatctcaaccgcaactaaatgagaaaaattatcaccttgacgcccgcatttaccccgataaaatgcccggctgcttgccatccggccaccgccgggcggtcaatgattatgacaacggattgtgatggactctctcggacaactcgccaaagacctttatcgtgggcgcatctcgcgcaaaccctttgttttttcgctggcgatcttcgccgttggcatcgtgctactgtcgtttctgtcgacctatctggataaaaaccattttcgcgcccatgcgcacggcgataccgaggaattcgtctcggtgctgctgtatctgctgtgcatcatggtgtgggcgctgttctgttttggcctggtggcgtggtttatggccaaaaccgcgtttcggctcaacgatatcggcctgcccggatgggcgctggccgtggcgtgctatgtgtgttcggtgctgaacaattactctcccggcccggtggcgcgctggctgccgctgttcagtctggcggggatgatctgcgccctgctgttgccgcccgacgggctgcgccgcaagccggacggcaacgctgacgattaacgcagctgcaccaccttgttcgctgccggttcggccgccgtcagcctgccgctaacctggctgataccgccgccgctgttgtgggacaccacggcgatcggcaaacgccgcaactgccgggtcagctccggcgtgatatagccgatgtgggtgttctgttgctgtttccgccagcggtcggccgccctgcgacgggagaaatactggttgtatttggcccaggcgatcagagtgacggcattgaacaacgccacaatgatatacagcgagatcacttccagcagcgacagggcggagcccaccccgtgctgatccatcaccgacatcaggccgcggctgaacagataaagaaagccgcaccaggcgaaaagcgtcagcaggctgtctaccacgcgcggcagcaggccgcgctcggaataaatcaggacgtccgtcattctttgatcctcccaatgccccggtcggggcttatccagcgcgcacgcccgcgccgagctttcaacatcactttggaaaacgccaccagcgtggtcagcaagctgagcagccaatacaccagcggataccagatgatccagaacaacgagcggccaaagcccttctcatagcgcttctccagcagcagactgacggtgaactgcagcaagcacaccacgcccagcaccaggccggtaaacgccggcgtcagcagcgagtgaatgcggatgccctccggcagcggtatcgccagtccaaccagaaaaatcagcacgctgaccaggtaagtgaacgcccacagcgtggagaggcaatactcggcgaacagcagccacatatgccggtgctcccaggcccacaggttgcgcagattctttaaaaacacctcggcgccgccctgcgcccagcgcaggcgctgcttccatagcccgcgcaaggtctccggcatcaggatccagcacagcgctcgcggttcgaagaagatagcccagtgcttcagctgcagcttccagctgatgtcgatgtcttcggtgatcatgtcctgactccagtaaccgacatcggtaagcgcttgcttacgaaacgccgcgaccacgccggagatggtgaacaggcggccataaacgcgctgcgtgcgcttgataaggccgatgatcgacgaaaactcaccgacctggatgcggccgatcagcgtggagcgcgtgcggatgcgcggattgccggtcaccgcgccgacatgcggattggccaacagcggcgccaccaaataggctgccgcatcgcgatccagcagcgcatcgccgtcgatgcacaccagatactcgctgcgcgccgccgctgcgcccgcctgcagtgcaatcgccttgccctgattttgcgccagatggatcactcgcagccgggggaactccagcgtcaactggtccaacacctcggcggtgtcatcgctcgagccgtcgttgatggcgatcacttcgatattgtcatagcgctgcgccatcgccgccgaaatggtttcacgcgcgttcaacccttcgttgaaacaggggatcagcacgctgatcgacgggttgcccggcagcgccggcgcgggcatgtccgggctccagcgccaatgccgctcgcgatgcagccagaaatagatgccgccggcgatccagatgccggacatgaacaacggccagaagaacacgaagttgagcagcatttcgccggtaaacagcaggacgatgccgaaaggcacgctcaacaccagacacaggataaataaggcaattaaacgatctgtcatggcagtgggaaccaggctgaggacaacaccgggcgaacggcgtccagcttaggccgatcgtcgaggaagttgtcggggtaataaccaaagctctgagcgccattgcgctgcaggcgacgcatccattcggccagcagttgaccgtcatccaggctgattcggcgctccttgcgccagtcgacagcctgcaactcaaacaccgttttatcgagcgcgccggggtaagcggccactttgcccaccagttgatccagccagcggccgctgtcggcgcgcggcacgttttccatcagcggcatcgccatcggcgctacccagtcgtaggcctgcaggaaatccgctaaattctggccgaaccaggcttcactggcgggatcgagtaccggcatcgcataaatattgcgcgcggtttgcacctgcggaccgcggatcgcccgcacccgttcggccagcgactgggtaaagtcgatcagcgcccggctcttgaagcgcgtccagcgcgccatcgcctgcggatcctgacgaatcgccgccaccgaatcggcgaaaccggcctggcgataggccgcaacggcttcggggccggcatcttcgaagtccgacagcagcgcatcgtcgtggaacaggatccctttgaaagtggcgtgggccgccagatcctcgtagatctcaccgatgcgctggcgcgccaccggactgaacggcgacaggcgacgatactgcttgtcgtctaccgacagctgcccgctttgcggatcgaggcgctgcacgcgcggcacgtcagaccccagctcgaacgccagcaccggcatccaggcatacacggccacgccggtgcgcgacgagagctgccaggagacccggttgaacaggtcggccttcatcggcagccagcggttggggaaatagagctcgcgcacgttgccgtcgccttttggatcggcgaacgcctgcaggaaaacggtattgatgcgcaggtcgtagatgcgctggatcagcttgtcgagatttttggcctgctgctgcggatcgggatcgtagaggtagtcgagatcgacgtgcgccacccgcatgatctgtcggttctgtatctgcgtcagctgctgggcgaagctcgtcagcgacggattgccggccaccagcatgcgcggcacgttctcaggcgcgttgacgtctcccagcccgttctccagcgtcagcgccatgcggtaaccgtgcttgcgcgcgatatccagcgccacgccgccggccgcaccgtacggccagacccacacgcgcggcgccttaccggtggcagcggtgatgcgccgggtgatcaacgccacgtccttctcgatgcgttggcggtattccgtctcgctttcatagcggccctgcttggcgtcgtacagccgattggcgaccgccggttcggtattgccctgcgggttggcgatgccgccataatgcgaggcgtaggtatgcgcgccgatctccaccagcccggagtccgacacttcccgcacctgctgccaggtgaggaagcgatcgcgcggcgtcatcaggccgccgaaatcgaccggcttgtcggccggcgcatccagccaaacgccgaccggcgccagcaccgccggccagttgtaggccttcagcaacgggaatacccggctgtagaagctgcggtagccgtcgtcgaaagtcagcagcaccgccttgttaggcaacgccgggccgccgttctgcgcctgcaggatctgttcgaccgaaaccggctgatagccgttttgcttcagccaggcgaactgttcgttaagcgcgctggtgcgcaccgacatgtagcgctggtccgccgcgccgtcttccacgtcgtgatacgccagcaccgcgtagcggttggccggccacgggcgttccattggccccacggatcgctccgccggcggcgtgaagcgcggtacgtccgcctgactgcaggcggtggtcagcaacgcggccagcactaaaagcgaggatcgaataagcatgatgattcctttaaaaacgataattcagatcaaacgtcacgccgatgttccgctcgcgtttgccgtcgtacggatgcttctcaaactgcagcatcacgccggcgtccagcactccgttccagctgacgcgctggccgtaacccagctgggtgatcggcttgcgcgcatagtcccgctgccagtagctgccggcgccggcctggaactgctggctccactcggtctgataatggcgatacagggtgtgatcgagcgttaacgacggcagcagcgtgaagtcgtgcttcgggttgtaatacggcacgttctcctggctgttgcggctgccggacagcgtcaggttcatgtccagccgataacgggcgccggcgagcagccgttgccgcccttccaggccgtattccagccggttgttgccgtccgagaagtgcgaaggcgccacgctggcgcgcagctcgcggctttcgttctgctgccaacgcagccacaggttgccgccgttggcgctgatgccgttggtcaacgcgcgcagcggcgtctcggccgacaggcgcgccaccgaaccgccgaggcgccattgatcattcaggtcataccaggatgagaggcgcaggccgagctcattgccgtggccgtagttgcggttggccacctcggcctccagccacagatcgcgcgagcgccactcggcaccggcgctgagatcgcggttgatgcccttgccctcgtcgaactggccggtgttgaatccccagccggtgaacagccgccagttgtcgtcgatcggcggtgaatagagcgcggcgtgtatgccgaaatcgtggctgccgctgaccggcccgtcggaatcgatgccctgattgccgctgatgcgcagttcagacatatggtgaatgcggcgcgaacgttcaaactgctgagcggcgacgctttccggcgcgcgctggatgacgtcgtcggccagcaaatccagttggcgccactcctgcaacccctgcgcgacatagccctgctggatctccaacggcaggctgcgcggctccagcccttccacctgtttcaactcctcctcggcgcgacgcggccagccgcgcgccaaataaacgctggccaaggagatgcgcagaccctgattgcccggcgccgtgcgcgccagatgggtcagctgccgttcggcctcggccagatcgcgttgataaacccgcgactgcgccaacagcgattggccgaccagccagtcatcgttgtaggccagcgtcggcagctggtacaggcgggtcgcgtagggatagcgctggctgacgcgctgcgccagcagcgccgcctgatcgatgcgttcgttctccgcctgcgcgtaaaacagatcggtttcgtcttcggcggtcaccgcctgcggtgcggcggcgttcaggcggccgaaaatggcctgcgccttgtccggctgctgcagatagaggtaggcggacgccgcccagtgctgggcataatccggcaccgtgcgcccttccgcctgcagggtttgatactcgctcaccacgtcggccattcgataacgcgccagcagcgcgccaaggcgatcgatacgcgcctgttggtagctgtcctgcgcctccggcagcggccgccactgcgtcagcagttggtcatagcgcgccagcgcgcgatcggcgatgacgaaacgttcctgttcgccgcgagcatcgataaacgacaaccgcaccagctcggcggcttcatccgcctgcaggcgccgctgctgcacgggcggcaatgtcagcccctggctttcacgcagcgccggatccgcaacccgattcgccgccagcagcgtcacgtaataagcctgaattccggtgtcggacggcgccagcgcgcgggcatgagtggcgttttccagcgccgcccagctgcggccggcggcctggtccacataggcgcgcgtcagataccacgtcgccggctccagcagcttctccgctttggccgcctccgtttgcgcctgcgcatcctgcccggcatccgccagcgtcatcacatagccacgctgtaagccgccgtcggcgggagcgagctgcaacgccgtacgccacagtcgcagcgatggttgccactgcttcaggttgcgataggcgcgagccgccgtcgccagactggcgctatcccgctgcagcgcggcgccgtcggcacgccaaagcgcgactacctcttcatcgtggccggcccacccggccacctggatataatcggctcgctgctgcaggctcaacccctcctgagcgcgccgctgcgataaatacgccagcaccggcgcagtatcgcccgatctggcctgacggatcagcgcgtcatagcgttcatccgccagcgcggtggccggcagggataaaccgataaacagcaatgacgccgcatatttggtagcgtggcgttcggtaaagcgtaatgaacgcgagttaactttaggcacgaggtattcctttaatccgtgagctgctgtcctggcaaagtagaaatgcgagcaggcacccgaaaagtcggctagagccgccgggtaataagcatggagtaatgaatatttctgtctggcgcacgcttaaatagaatcgaatgcgcctttgcctaaaaagagtattttataaatctgccaatgaataccgcagccaggtgatatctgcctgaaactggaatttcacaattatcaataagtgaaataacaaaaattaaaacaatataaatcaataagataaaatacattaatgatcaatattcttaatttcactctttcgtgtgaaattgtataaaaccggtgtgatatttgattttaattctcattatcaccggtcgacaggaatattaatccaaacatccaattaaataacctgccttgttggagaaaataacaagattattgttaacacgaacattaaatttgcctgctaataattattcaattcaatttaaattcccccacggatacattcatgctggctatctcccgagcatgccgtcacaatagcgtctcattctggtttcaatcagggattgccatgtacagccactaccccgcccattacaccttcgatagcgacagcgacgcctggcagatcggtttccacgacttccccgagtggcaatctgcctgctataaacgcgaagacatcgagctggaagcgcaggaaagcctgctggccgccatcgccgccgcgatggatgaagggctgcccctgcccgccccttctccttcgcaaaccgatgacttgagggtacatctgccggcgctggtggcgctgaagatcgaactgcacaacgcgatgctgcgcaaaaacaccggtaaagcggcgctggcgcgcaagctgggtttcaacggcgggcaaatggagcggttgctggatatcggctacgcttcaaaagtggaagcgctggagcaggcgttgtatctgctgggctacgaagtgcgcgtgacgataagtgaagtttgccaataagttagcggcaggtaagcgaaatattatccaagggggctaaatttcccccgttttgcgccgatatgatggctacctaatcacttgtcgcaacaacgaaggctaaaaatggagtggagtcgccgtcatatttgggccgttattctgctgtcttgtctcgttttttgggtcattttggcgaccggcatcaacgccgtcgcctgagcgcctgccaccgtattgcaatacccgattttaaagcccgccacacggcgggctttctgttcacgacgtatcgctaactggaatgcgtggtaaagttcttacaagaaaaatcaagcaaattctcagtgtgccccgtattgtttttcatcgccccttcctcgtcagccaataaaataaacccttgttgtttatcttcaaaagtaacggggacgaccgccacaccaaactttctcatatccgcgttttttttaatcagatcatgacctatattgataaatggaaacacaccgtccaaatccgcttgccttattcgcatacctaaataatgttgcccaaccaagttgtctttcaacggtgtccattcatccccaatattaggtagctggcggtctatactgcgtctgacatgcggtttcaagcatgaaatgtgaatgtgcaattgcccttgagtacggcctcgctgcgagtttattgttaaagcataagcttctcgtggcaatgaagagccataaacctcttccagaacatgtcgattctgccaagccaacgcaaaataatttggcgtatcagctaataacagttccggactttcgactcccgccattttcaacgttggcacgagcaaataatgatagcggctttcaagatcgcgtacgatggcatagccacgagcgacaccttcatccattgaaactttatcgcagggaaatggtgttcctaaatattgatagttaaacacacatagattattcactacgcgccacaaagcattactggcaaaagcagacggcggggtcgctatcaaaaaaagcaccgatgctttaaaaaaaaaccttaataacaacaaattaaaaatccttttcgattgtagccagcctacgttacaacgctatcctagcgtcgaaacttactataggtaaacataaataaaaagcgttataaaacagcgcaccctgttcaaaaaacagcctcaaattgtgatcaaaaacacagtattgaaatcagaccagtattgagagtacattagcgccgatcctgtcgcggttcggattttacctcacggagcatgaggcgcgacaaccggacaacccgcgctcgaggacgttgttcttccgcttggaagaatccgcccgacaagcaggttgcccataaaatactcagcacaacaatcgggatcattgctggcgaggactccagacaggagttgttcagtgaaatattttttgatgggcgtgtcattcatgctggttgcctgggttggcaccttcatgttgatggttgcctgacagcagccacaccaggaacacagacaaagggacgcgcaagcgtccctttgtcgtttcggctagcgctcatttgcccggcatcatgcggcgcagggtgtcgtccttgcgcaggtagtggtgatacagcgccgccagcgcatgcgcgccaatgataaagtagccaacgtttgccagcgtctcatgcaccgttttgaccagcttacgcatcaccggatccggcgtcacccactgcggcatcggccagcccagcaaagaccacgatttcccaccgtaggccagggttaacatgcccagcagcggcaacatcaggaagaccacgtacagcagccaatggaaaatcttcgcgcctacctcctgccactcctccagcggaggcgtggttggcggcgcagcgtggaaagagcgcaccgccaaccgaatcagcatcagggcaaagaccgataccccaaagttgaaatgcagatttttgaccatcggcgcccacgcctccggcaccgaatctttcagcaacatcgccgcataggtgaggatcaccatcagcaacgtcagccaatgtaaaacgatttgcgatcgcgcgtagcggttgctcatacactctgtccaaaaaataaaattcagcgtagttgagcataatggggaaataatgaagaaaaccttgggacggaaaaaataaggccgggcgaacgcccggcctgacagggttatttggcgctgccggctttacccggcttcagcagcccgtccgcgcggaacatcgccttgatgccgcgcaccgcctggcggatacgatcctgattctcgatcagcgcgaagcgcacgtgggtatcgccgtagtcgccgaagccgatgcccggcgagacgcagaccttggcttccgccagcaggcgcttggcgaactccagcgaaccgaggtgggcataaggctcggggattttcgcccacacgtacatcgacgccttcgggttttccaccatccagccggcctcgtgcagccccttcaccagcacgttgcggcgctgccgatactgctcggcgatatcgcgcacgcactgctgatcgccttccagcgcggcgatggccgccacctgcagcggcgtgaaggtgccgtagtcgtgataacttttgatgcgcgccagcgcgctgaccagctcagggttgccgaccatgaaaccgatgcgccagccggccatgttgtagcttttcgacagggtgaagaactccaccgcaatgtctttcgcccccggcacctgcatgatcgacggcgctttccagccgtcataaacgatgtcggcataggccaggtcgtggatcaccagcacgttgtactgtttggccagcgccaccacccgctcgaagaaatccagctccacgcactgcgcagtcgggttggacgggaagccgaggatcatcattttcgggcgcggaatggtttcccgaatggcgcgctccagttcactgaagaaatccacgccgtccaccagcggcaccgaacgcacctgggcgccggcgatcaccgcgccgtaaatgtggatcgggtaactggggttcggcaccagcacggtatcgccgtgatcgagggtcgccagcatcaggtgtgccagcccctctttcgaaccgatggtgacgatggcttcgctttccggatcgatatccacctgataacgatcggcataccagcgcgaaatggcgcggcgcaggcgcggaatgccgcgcgaggtggaataaccgtgggtgtcgtcgcgctgggcgacggcgcacagtttttccacgatgtgcggcggcgtcgggccgtcggggttccccatgctgaaatcgataatatcctcaccgcgacggcgtgcggccatcttcagttcggcggtgatgttgaatacgtaagggggaagacgttcaatgcgcgtaaaacggcgctgtggactgttatcagccataggggattcctcgataaacgttagcgcccggaccgtccgagcgacgctggccagcgaactgaccgaatatcgaacatagcgcagcgccggcgagcttgtcgatacccggcgcgatatttttatttgccgccctgaaactccgccgccaacagcccgaacagccagtcgtcgcgccactctcccgccaggcggaaattatcgcgcagcgtgccttccagctgaaaaccacacgactccagcaggccgcgcgaggcgaggttgccggaggtcacggtagcggtcagcttgtgaaaaccgcaggcgttcaccgcaaaatccagcaccgcccgcagcgactccttaccatagcccttgccctggccggagggcaaactgccatatcccacctccgcctgccgatacggcagccactgcgggcgaaagccggtaatgcccaccgcctccccgctgtgcttctcacgcatcaccagacacagccactgatcgccgtgtttgtcccaggccggcagccgcgcgtcgaaacgctcgcggatcgccgcttcgctgagcggatcggcgatatagcggatcacctcaggatcctggtaaaggcgcagaaacagcggccagtcctcggcggttatcgactgtaagtacaagcgttcagtgaccagcttcataaaatctccgaaaaacgaaaaagaggaacttacgaatgaaagatatctctttattttccccgattggttgccgataatcattcacgttaaaaccacaaaaccataacgtcttgcccgattccctacaaccgtccgccgcagtgactcacgcggcaccaggagaacaccatggcctctttagtcatcgatgatattccgcagacgatcgttaacgtcaagcgccagctgcgccaggccttgccgaactaccgcgaagtttttctggcgctggaggagaacatccgcggccaggtcgaccagatccgccacgaactggccgccggccataatccggtgccgcagatcgacgcggaagatatcctgcagcagcgcgtcagcgatcaacagatagcgctgatcaaacagcgcggcgcctgcgccattcgcggcgtgtttccccgcgccaaggccgaaggctggaaccgggaaatcggcgactatctcgagcgcaacaacttcgtcgagcggttgaaaaacgccgccgaagacaactatttcggcaagctggccgccagcaagccacagatttatggcatctattggtcaaagccgcaggtcgaagcgcggcaggatgcgcgcatgcatgcggtgcaggtgttcctcaacggcctgtgggccaccgaaagcaacggcaagcagcatttcgatccgacccgcatcgccacctacgccgatcgcactcgccgccgcccgccgaactcctcgtcgctgggcctgtcgccgcacgtcgacagcggcaccatcgagcgctggctggacgagaatttccgctatgtgtatcgccacgtgttctccggcgactggcagcagtacgatccctttgccgccgacggccgcaccgaagtgcgcgaaatagcctccccggcagtctgctcgatgttccgcaccttccagggctggacggcgctgacgccgcaacgcaccaacgccggcacgctgaacctggtgccgatcgccaacgccatggcctatgtgctgctgcgcgcgctgcaggacgacgtcgccgacgacgatctgtgcgatgcggcgccgggccgcgcgctgtcgatctcggaaaaatggcatccccttttattaagtgggatttcccctattcccgatctggagccgggcgacacggtattttggcattgcgacgtgatccacgcggtggagaacgagcataacggcgagttcgacagcaacgtgatgtacatcgccgccgcgccgggctgcgcgaaaaacgacgcctacctgcagcgtcagctgccgagctttatcgacggcagaacaccgccggacttcgctcccgacgacttcgaagtggattttgacggccgcgccaccgccgatctgctgacgccgctgggcaaagcgcagctcggcatgcgctgaccgccggcctgagccacgggcctttctcgctgtggtatactgccgccatccgtaggccgcagcgagaacccgtcgtgcaccctttttttgaaatgctgttggcggtgtttgatcgcgccgcgctgatgttaatctgtctgttttttctgacccgcacccggctgttccgccaactgctgcaaaaagaagaccatacgccgctcgagctcggcatcgtcacggcgatcttctcgctgttcgcgctgttcagcacctactccggcatcaacgttgagggctcgctggtcaacgtgcgcgtcatcgccatcatggccggcggcatcctgttcggcccctgggtggggatcgtcaccggcatcatcgccggggtgcaccgctatctgatcgacatcggcggcatcacctcggtgccctgcctcatcaccagcatcatcgccggcatcagcgccggctacatcaacctcaaggtgagaaaagagcagcgctggcgcgccggcatcgtcggcggcatgctgtgcgaatccctcaccatgctgctgatcgtgctgtgggccaagccgaccgagcttgggctcgacatcgtgtcgcagatcgcgctgccgatgatcctcggcacggtgtgcatcggcctgatcgtgctgctggtgcagagcgtcgaagatgaaaaagaagtgatcgccgcacgccaggccaagctggcactggatatcgcccacaagacgctgccctattttcgcaacatcaacagcgaatcgctggccaccatttgcgatatcatccgccaggacatccgcgccgacgcggtggcgatcaccgatacccatcaggtgctggcttacgttggcgtggggcgcgaagcctacccgatcggccgcgaagggctgagccgcgttacccgcgaaagtattcgccacggcaaaatcatcatcaaaaacaacctggaaaacccggccgcgccgcagatccattcgcagctggtggtgccgctgtgggaaaagggcgaagtgaccggcgcgctgaaaatttactactgccacgctcaccagatcaccaacacgctgaaggtaatggcggtcgggctgtcgcagatcatctccacgcagatggaggtttcgcgcatcgagcatctgcgccagatggcggataaagccgaaatgcgcgcgctgcagagcaagattaacccgcacttcctgttcaacgcgctgaacgccatctcttcctctatccgcctgaatccggacaccgcgcgccagctgatcatcaacctgtcgcgctacctgcgctacaacctggagctgaacgacgaactgatcgatatccgtaaggaactgcatcagattcaggactatatcgccatcgaacaagcgcgcttcggcgccaagctgacggtgatttacgacatcgacgacgacgtctcggtgcgcattccgagcctgctgatccagccgctggtggagaacgccatcgtgcacggcatccagccctgcaagggtaaaggggtggtggtgatcgcggtgaaagatcagggcgatcgggtgaaaatttcggtgaaggataccggccacggcatcaaccaggaaaccatcgaccgggtggcgcgcaacgagatgccgggccacaatatcggcctgctcaacgtgcatcaccgcgtgtcgctgctgtacggtgaagggttgcatatccgccgcctggagccgggcaccgaaatcgcgttctatatcagcaaaaacggcggcaagctgcatcaggaaccgagcgcgccgccggtcggggaggcctcatgaaagctatcatcgtggaagacgaattcctcgcgcaggaagaactcagctacctgatcaagaaacacagcaatatcgatatcgtcgctaccttcgaggacggcctcgacgttctgaaatacctgcaaacccaccaggtcgacgccattttcctcgacatcaacatcccgtcgctggacggcgtgttgctggcgcaaaacatcagcaaattcgcccatcgcccgtctatcgtgttcatcaccgcctataaagagcacgcggtggaagcgttcgagatcgaagcgttcgactatatcctcaagccctatcacgaggcgcgcatcgtcaccatgttgcaaaaactggaggcgctgcatcatcgccccgccggcgcgacggagccggccagcgcgccgagccgcggcagccacagcatcaacctgatcaaagacgagcggatcatcgttaccgacatcaacgacatctattacgccgccgccgatgaaaaggtgacgcgggtctatactcgccgggaagaattcgtgatgccgatgaacctcaccgagttttacggccggctgccggaagagcatttcttccgctgccaccgctcttactgcgttaacctggccaagatccgcgagatcgtgccctggttcaacaatacctacattctgcggctgagcgatcttgagtttgaagtgccggtcagccgcagcaaggtgaaagaatttcgcaagctgatgcgcctgtaagcgcttaccagcgcgggcccggacggtagtaatagccgggcggcggtggtggcggcatgcggtaatgcggccgatctcgccagttgcgccgcggcggcccgtagtaaatcacccgtggcggcgggccataatagtacccgcgcgaacgttcataccggtgatgatcggcccaccagcgcggatcgcgccagcgatagccgtcccagtagtggccgcgatgatcgcgatcgccgatatgcaacgacaggcccggcacgttcacgccgatggagacgtcggcctggctcgccagcggcagcgccagcagcgcagccagtaacaacagcgtttttttcatttcatggactcctgcagagcggacctcgtccgatcgcagataacatagtcccgcgctcgccgccgctctataggcgcaatgccgatttacgccttgcagacgcatccttcacaatttcaccacaatcgttcaccggcgattaacaataaatcgttgatatctttgatgtagatcacgtgttactcccggcatttcacgcgcttttaggcgtaaaaacggcaactcacgccgtataaaatgcatttcattccttctgccgtgcaattcattcccgatccgccgtccgccgggggggccggccatataataagcccagaccgcgggaacacagattcaccccgcaaatttcagccagcggctcacgcccggcaacgcacacacaggaaggagaccggccatgaacaccaaaccggcaaatcgcagcttaatcgttctcggcaccatcatctgtcagatgggtctgggcaccatctacacctggagcctgttcaaccagccgctggtcgacaagttccactggggactggcggacgtcgccaccaccttctccatcaccagcttcttcctggctttcgccacgctgttcgccggcaagctgcaagaacgcttcggcatccgcaacctgacgctgtgttccggcatcctggtcggcctgggcctgatcgccagcgcccatgtcagctcgctcgacatgatctacctgctggccggcgtggtggtgggctttgcggtcggtatcgcctacatctccaccctgtccaacctgattaaatggttcccggccaacaaaggcctgatttccggcatctccgtcggcgccttcggcagcggcagcctgctgttcaaatacgtcaacgccgccctgatcgccgacgtcggcgtttcaggcgccttcttctactggggtgccatcgtgatgggcctgatcgtcgtcggctccctgttgctgaaagagccggtgctggcaaccagcgccgcacagccaggcgccaacggtctgggcaacgacttcagcgtgcgccagatgctggccaccaaagaagcttacctgctgttcaccatcttcttcgccgcctgcatgagcggtctgtacctgattggcatcgtgaaagacatgggcgttcagctggccgggatggatttggccaccgccgccaacaccgtgtccgccgtcgccatcttcaacaccgccggccgcatcattctgggtacgctgtctgataaagtaggccgtatgcgcgtcatcagcttcaccatgctggttaccgtgctggcgattgtcgcgctgagtttcatgaccctgaaccacacgctgttcttcatctgcgttggcgcggtggccttctgcttcggcggcaatatcaccgtgttcccggcgattgtcggcgacttcttcggcctgaagaaccacagcaagaactacggcatcatctatcagggcttcggcctgggcgcgctggccggttcgttcgtcgccaaatacttcggcggcttccacgccaccttcatggtgattggcgtcctgtctgccacttctttgctgattacactgttcatcaaagcgccgaaagcggtggaaatggaaagcgaagaaaccgcacaggcggcggagctggccaaagcctgatcccctgcgaaaacgacaaggggcgcaacctgcgggttgcgccccttttttattgccccgccgcgcggcttacagccgcatgcccagcgtctggcgcagatgcgcgccggcccccaacaggcccggctggccatgggttatcatgaacaccggaatgtctcgcacatagtcacggaaacgccctttgtcttcgaaggcggcgcggaagcccgaggccttgaagaattccataaagcgcggcacgatgccgccggcgatgtacacaccgccgaaggtgcccagattcagcgccaggttgccaccgaagcgccccatgatcacgcaaaacagcgacagcgcgcggcggcagtcgatacagctgtcggccagcgcccgctcagtgatgtccttcggctccagtttctccggcaggcggttgtccgccttaacgatggcgcgatacagattgaccaggcccggcccggacagcacgcgctcggcggaaacgtgccccacttcaccgcgcagcacctccagaataatgtcttcttcttcgctgttcggcgcgaaatcaacatggccgccctcgcccggcaggctgacccagcggcgatcgacctgcaccaggtgggcaacacccagcccggtgccggcgccgtacaccgcgatcggtttgcccggctgcgcatcgccgccgccaaactgcagcacgtcgtccggcgagagcatcgggatcgccatcgagacggcggtgaaatcgttgatcacttccaggtgactcagccccaggctggccttcatttctttgatcgagaacgcccagctgtgattggtcatcgcgacccagtcttccgtcaccgggcaagcgatcgcgatgcaggcgtcctgcacctcgatctcgcactctttcaggtattggcggatcaccgcctccaggctgtcgaactccaggccggaataggttttcgcctgggtaatctcacccgtcgcaacagtgcacaacgccaggcgggcattggtgccgccaacatcacccacgagggcataggtcattgatttcgtctccgcaaaatgaaaaataaaacgctgcccacactgtaaaatcctgctgcgaaaacaacaatcacccgcctcggatctgcacctcaatagcgatccggatcacaaaaaacgtttcagcttgtccgctatgctgcgatttgaaacaaattgcggcaaaaaacgccccccggcgactgttaaccgtcatcgccgccgggcaatatcaatgcgtgcctgcgcgccgatagtctggcaagctgtggccactgcccaaccacccgcactccctgccccgcagggaggcatcgacaagggattattcatgctgcatccgcgcgccaatgccatgttggcctttgctttgcctgcgctgattatcggttccgtttccagtctggtgctgctgttggtgatgaaaattgccgccgcattgcagcaattactgtgggtgacgctgcccgatgcgctgagcctggacgcccagtcgccctggtggccggttgcgatgctgacgctgaccggcgtggcggtcggcctgatcgtgcgttatatgccgggtcacgccgggccggatccggcgacggaatcgctgatcggcatgccgctgccactctccgccttgccggggttggggttggcgctgattgtcggcctggccggcggcgtcagtctggggccggagaacccgatcaccgccatcaacatcgcactggtggcggcggccggcgcgcgcctgctgccgaaggtgccgcgcatggactggatcatcctggcggcggcaggcaccatcggcgcaatgttcggcacaccggtcgccgccgcgctgatcttctcgcaaaccctggccggcaataacgaaacgccgctgtgggatcggctgttcgccccgctggtggctgccgccgccggcgcggtcaccacgcagatgttcttcgtgcccaatttcgccctgcagctcgatgcctacgacgtgacgcggctgccggacattttcagcggcgccatcgtggcgctgatcgccatcgcgctcggcatggtggcgctgtggtgtttcccgcacgttcaccgcctgttccattcaatgaagaatccggtgttgatgttagggctgggcggctttgtgctggggctgctggcgctgttgggcggagagattaccctgttcaaggggctggatgagatgaaacgcctggcggtggacgacagctattcggtgccggcgctgttgaccattaccctgaccaagctggcggcgctggtgatcgccgccgcctgcggttttcgcggcgggcgcatcttcccggcggtgttcgtcggtgcggcgctgggcctgatgctgcaccagcatgttccggcggtgccggcggcgatcaccgtctcctgcgccatcatggggctggtgctggtagtgacgcgcgacggctggctgagcctgtttatggcggtggcggtggtgccggatctgcacctgctgccggtgttgtgcatcgtgatgctgcccgcctggctggcgctggcgggcaagccgctgatgctggtaaaccgccggcaaacgccgcgcgacgattaggccagcgcgaacgccgcggcggcgcgggcgtggattgcagtggtgtcgaacaccggcaccgacgcatcccgctcgctcaccagcaagcctatttcggtgcagccgaaaataatcccctgcgccccctgttgttccagatcgctgataatccggcgatactcgtcgcgcgaggcgtcgcgaattttaccgaggcacagctcgtcatagatgatgcggtgtacgatgtcgcgatcggcgctgaccggcgtcaccacgtcgatgccgtgcaattcctgcaggcggccgcggtaaaagttttgctccatggtaaagcgcgtgcccagcagcccaacgcggcaaatgtttttttcccgcacctgcagcgccgtggcatcggcgatgtgaatcagcggcagaccgctggcctgctcgaccgcctccgccaccttgtgcatggtgttggtgcagatcacgatagcttcggcgccggcggcgcgcaaagccaccgcggcggcggccaacagccggccggcgccgtcccaatcgccctggtgctgcaagcgctcaatctcctggaaatcgacgctgtagagcacgattttggccgaatgcagcccgccaaggcgcgcctttacctgctcgttgatggtgcggtaatacggaatggtggattcccagctcatgccgcccagcagacccaacactttcatccttcgttcctcagcatttccgacgatcctctgaccttacctgagaatcgtcggtctgacgacgccttatttggcgccggaattgatcggctggcgcgcctcgaaccagcgctgacgcagcatgtcgtacagccagttataggccatggtgtacggcaggaagaacaggaagaaaccgatttccagcataaacgcctgcgtccaggagatgctcagcatccaggcggcgatcggcacgccgatcaggataaaaccggcttcaaagccgacggcgtgcagcgcacgcaccttcaggttacgcaccacccggctgaccggccacaggcggtcgaacaccgtgttgtaaaccatgttccacagcatcgcgacggtggagagcattaccgccaacgcaccgacctgcaccattgaacggttcagcagccacgcgcccagcggggcgcaaaccatcacggcgatggcctcgaaaccgacggcgtggacgatacgttcaatgagagacttgttttgcagttgcatacatcaccttttttcaacagttgttgcgaaagccaggtgattatcatcgcttttttgggtagattaaaaatagattccatcgataaagtagatagatcatgcgctattccccggaagcgttgcacgcgtttgtcgaagccgccgccctcggctcgttttccgccgccgcgcgcaaactgcgcaaaagccaatccaccatcagcaccgccatcgccaatctggaagccgacctggcgctgaccctgttcgatcgcggcgcgcgccagccggtgctcaccgctgccggccgcaaagtgctgggacatgtgcaggcgatcctggccgccagcgaacgcctcgacgccctgagcattcagttggcgggcgaggttgaaccgcgcctgagcatggtgttttccgatacctaccagcccaagcatcacgatcggttgatgcaactgttcgaacagcgctacccggagattgagctggaatggatgatcgctgaggaaggcgacgtaatcgatctgctgcaaagcggccgcgcgcatttgggcatggtggaagtgcaaaaaagttatccgccggatatcgccttctcccggctgcctgagcagaccgaaatggggctgttcgtcgcccatcagcatccgctggcgcaggtcgctgcgccgacgccggagcaattgtccagcacccgccagttgatcctgaacacctacaccggcgccgaggcggccagacaaggcgggctggtctggtcggcacccagctatctgctgttgctcgagatggcggaacagggattcggttgggcggtgttgccgcactggctggtgcagcaatacggccacggcaggctcacccagctgcggccgcgcggctggcccaaactgatttcggtggatgcggtctggtccaaactgaccccgccgggcccggcggggttctggatgctggagcgcctgctgggcgacaccctgccttaagcggcggcgttgcgcgcctgaatggcgcgagagacggtatcgaggagttccggaatgtccatcttcggcagcatcacttcgatgaaagccagccggtcgccctgcgccgcctcactcagcgcctggcgcagcgcctccggctgactgacccgcaacgccttcaccggccgatcaccggccaacgccttcggcaactgcgtccagttccagcgcgcgatatcgttataacgttgctccggcccgtggatcgcgcgctcaacggtatacccctgattgttcaacacaaagatcaccggtttaagcccatctcgcagcatcgatcccagctcctgcacggtcaattgcgcggcgccgtcgccgatcaacagcaccacccggcgctgcggttcggcggtctgcacgccgaacgccgccggtaaggtatagccgatcgatccccagagcgcctgcacgatcatccggctgccgcgcggcaacgtcagcgccgccgcgccgaaacaggcggtaccctgatcggccagcacgatatcccccggccgcaggaaatcctgtacttgccgccagaaggcgtgctgatccagcccttccccatcgccttccggcagcgccgggcggacgatcggcggcaacggccaacgcgacgccagcgacaggctcaggcggtgcaatgcctgcaccgcctcgcgcatcggaatgcggctaaagcgctgccgcccgacccaggcttcgaacggttgaatatcgatgcatttttccaccggcaggtgatgcgtgaaccccgcggtaatggtgtcggtcaagcgtacgccgacgttgatcaccacatccgcgttttcgatcaattgtttcaccgccggatcgctggcgccgccgcagtaggtaccgacaaaaccggcgcgattctcgtccagctggcccttgccgagcaacagcgtcgcatgcggcatatcgacctcctgcagccactcgtccagcgccgcttcggcgccgaagcgatcggccaggaagtccgccagcagcgacacccgccgtgccgacagcagcttttcgcgcgccgcggcgataaacgcctgcaatgcgctctgcgacagtttggcctggcgcagcatcagcggcgccggtttactcggcagcggcgcctgcgcgacgtcgctgggcaacatcaggtaaaccgggcgatgctccagcaaggcggcgccgatcaggcggtctatctccagcgcagcgttgtcggcggtcaggtcggcctgcgcgacggtcacctctttggctatccgggcgaaatgagtgaagtcgccatcccccagcgaatgatgcagcaaatcaccggcgcgctgggcgcgctgcgccggcgtgccaaccacgtggatcaccggcaggtattcggcgtagctgccggccaccccgttcaacgcgctcagctcccccacgccgaaggtggtgagcagcgcggccgccggtttgcagcgcgcatagccgtcagccgcataggcggcgttcaactcgttggcgcagcctacccaggtgatttgcggatgcgcgaggacgtgatcgagaaattgcaggttgtaatcccccggcacgccgaagaaatgacggatgccgatttgggccagacgatcgagcagataatcggccaccgtataggtctgagtcatgatcatcacctgtctgcagctgaagcgattatcttaattatcgaagatgccgttcaaatttcgaacaatcatcccggcatcgaacggcaacctggcgttacatgccggcgtcgtgatcgctcccgcggcaacgcggtgtggaaacgtatacactcaaagcacttcacctttcgccgacaaggataactatgtcttacccagcctccccctcgcgttatcaagctatggaataccggcgctgtggccgcagcgggctgaagctgcccgccgtctcactcggcctgtggcacaacttcggcgacgccactttgtacgacaacgcccgtaccctgatccgctgcgccttcgatcgcggcattacccatttcgatctggccaataactacggcccgccgcccggcgccgccgaggagaactttggccgcattctcaacgccgatctgcgggcctggcgcgatgagctgatcgtctcctctaaagccggttacaccatgtggcccggcccctacggtgattggggctcgaaaaagtacctggtcgccagcctcgatcagagcctgaggcgcatggggttggagtatgtggatatcttttatcatcatcggccggatccggacacgccgctggaagaaaccatggcggcgctggatctgctggtgcaccagggcaaagcgctgtatgtcggcctgtccaactacccggccgagcgcgcgcgacaggccttcgacattctgcagcagctcggcacgccgtgcgtgatccaccaaccgaagtattcgatgttggaacgcgggccggagacggcgttgctggatacgctggaggaacatggcgtcggctctatcgccttctcgccgctggcgggcggcctgctgaccgatcgctacctgcacggcatcccgcaagattctcgcgccgccagcggcagccgcttcctgcagccggagcagctgaccgccgagcgactggacaaggtgcgccgcctcgatgcgctggcgcggcaacgcgggcagaagctgtcgcagatggcgctggcctgggtgctgcgcggcgatcgcgtgacctcagtgctgatcggcgccagcaagaatgcgcagatagaagacgcggtgggcatgctggccaatcgtcacttcagtgaagaagagctcgcgcagatcgagaacatcttattgtaatcgtttacaaattccgccgttcaatcgagcggcgatactccagaaaaatctcaaatcttaacttcctgcatcattttcagagtggctctcagattcaaccctatatgccggcgctatgatgccgatattgcagcaaaaataacgataaggccgcttttaaactgatgaacgcgcttcataaagtgacaaacggccaggccgcgcaagcgggaaggagaagccatgtttaaacctctgctcttggccgccattttggcggcgacggtactgcccgccgcacagcaggcgcatgccgaagggatcagcatcgatctgatgccgggcgtttcattgcgcatcggcgatcaggataaccgcggccgttactgggacggttacgattggcgggatcgcgactggtggcaaggccatcagggccgttatctcggcgaccgcagccgtcgcggttactactgggacggctatcgctggcgcgatggcgactactggcgtaagcactattactatcatgaaggacgctatcgtaaatacgacaaacactacgataagcaccactggaagaaagagaaaaagcaccatcacgatcatgaccgcgatcgctggcgccgccacggcgatgacgaccgcgattaaagacgacgggccggcgcaacgccggcccgcactgttttcgcttacagcacgctgccgatcagcaggtagccgttcaacccaaccaccaccagtacgatcagcttgcccagattttgcaccagcgggccgttgaccatttcccccatcagcgcccgattgccggtgaaagccagcagcggcaccagcgccagcgcaatgccgaagctgagcagcacctggctcagcaccagaatgcgcgtcgcatccatccccaacatgatgacgataaacgacggcagcatggtcaccgcgcgccgcagccacagcggaatatggaaacgcacgaacccctgcatcaccacctgccccgccagcgtgcccaccacggtagaagagaggccggcggccaccaggctcaggccgaacacggtggcggcggcgtgcccgagcagcggttgcagcgtcaggtaagccacgtcaagatcggcgatgccgctgtggccgctgaaatgaaacgcggcggcggcggtggccatcatcgccagattaacgaaaccggcgatggtcatagccacggcgacgtcgactttggtggcggcatagcgttccgccttgtcgtgctcgccgccgatttgggtgagcgacgaatgcagatagatcacgtgcggcatgatggtggcgcccaataccccggcagccaggaataccgcatcgccgttaggcaaatcgggcagcgccatccccttcagcagcggcgccaactgcggctgggagaaagccagctcgacgatgtaagcggcggcgacgaacaacaacagcccgccgatcaccagctccagcggcttttgcccgcgtttttgcagcatcagaattaaaaaggtggcgatgccggtcagcactgcgccctgcaacagagagacaccgagcagcagcttgaagccgatcgccgcgccgataaactcagccagatcggtcgccatggcgatgatctccgcctgtacccaataggcccacaccgccggccgcggaaagcgatcgcgaatatgctcggccagatttttcccggtggcgatgcccagcttggcggacaacagctggatcagcatcgccatcacgttggcccaaaccaccacccacagcaggctgtagccgaatgaggcgccggcctggatgttggtggcgaagttgccgggatcgatatagccgatagcggcgatgaaggcgggccccatgagcgagagtttaatttttctggcggagcgaccggaggtggtttcaaccacgcgactgttcagcatatgttgaacccttactgaaattacgtttatctccactctatataaatgataataattatcaagcgcatttagagcggtaaaacttatctctgtaatagccaacattaacggttttatcgaagggttcagcgcggagcttgccgatttccgtgcttttctgatgggattttggctgcaatacccctgaaagacaggttagcacaagaatacgaatttcctattgctgctttaacatcttgattttttatgcttttgcgcaacactttaggagaactcccactatgattttccatatttgcaatagaagtctcgtttttaaacgtagcgttacataaaatgacagccgaaattcagcctgcctcaaatttggagcaaacatgtcccatattgcgcactttgcgttggcgatagtggtggtagcgatcctggccctgttggtgtgccgcgatcgtaaaagcatccgcattcgctatgttattcaactactggttatcgaagtactgctggcctactttttcctgcattcggaagcgggtttgggcttcgtaaaaggattcgccgcgctgtttgacaaactgctcgggtttgcgggacaagggactgatttcgtgttcggcggcatgggcgacaaaggcctggcgttcttcttcctgaaggtgctgtgcccgatcgtcttcatttcggcgctgatcggtattctgcagtacatcaaggtgctgccgttcatcatccgcattatcggcaccgtgctgtcgaaagtgaacggcatgggcaagctggagtcgtttaacgccgtcagctcgctgatcctggggcaatccgaaaacttcatcgcctacaaggatatcctgggcaagatgtcggaaaagcgcatgtacaccatggcggcgaccgcgatgtctacggtttccatgtccatcgtcggcgcctacatgaccatgctggacgccaaattcgtggtggcggcgctggtattgaacatgttcagcacctttatcgtgctgtcgctggtcaacccgtacgacaccaataaagaagaagagctgcacctcggcaacctgcacgaaggccagagcttctttgaaatgctgggtgaatacatcctggcgggcttcaaagtagcgattatcgtcgccgcgatgctgattggcttcatcgccctgatcgccgcgctcaacggtgtgttcagcgccattttcggcctgagcttccaggaaatcctcggttacttcttctatccgttcgcctggatcatgggcattcctaagcacgaagccctgcaggttggcagcatcatggccaccaagctggtttccaacgaattcgtggccatgatggaactgcagaaagtctctgccgagctgtcgccgcgcagcctggggatcctgtcggtgttcctggtgtccttcgccaacttctcttccatcggcatcgtggccggtgcgatcaagggcctgaacgaacaccagggcaacgtggtgtcacgctttggcctgaagctggtgtacggctctacgctggtcagcatcctgtccgcttctatcgcgggtctggtgctgggctaagcctgaaattcacagcaatgataaggcgcctgcgggcgccttttttattggccggcattcggcgaaggttaaatgacacaaagcaaaaagccgaccctaaggtcggctttttaaatggtggtggagctagacgggatcgaaccgtcgacctcttgcatgccatgcaagcgctctcccagctgagctatagccccacaaaagtggtacgctttgaccggcgttacggtatccccaacctttctgagaagaagattggtggagctagacgggatcgaaccgtcgacctcttgcatgccatgcaagcgctctcccagctgagctatagccccgttccacaatcactttgtgctgtgaacggggcgcataatatgaaacccgctcaaagctgtcaacggctaaattgaattactgaatcaagcgttgaaaaagccgccaaatcagcatctttggcgccaaaaaatcatcactttgcgcagagttcatccattttgcgcgctacatctcaaaatggcgaaagaccctgcatatcacgttgatttttaattaacggaatgttagcgaaatgcgcttgagtcggactcccgagcggcatagactgcccgcgccataaacttcattactataaaccgagtccgtcatgtctttgcattcaccaaaagaaatcgccgccctcgccgttcaggccggggtaaacaaaagccgcgccccgctcgctaatctgctgattctgggctttctcgccggcgcctttatcgccaccggcttcctgctggatattcacgtcatcggcaccctgccggccgaatggggctctttcggcgcgctgttgggcgcagcggtgttcccgatcggcctgatcctgaccattctggccggcggcgaactactgaccggcaacatgatgaccttgccaatggcctggttcgcccgtgaaattcccgccatcgccgtgctgcgcaactggttttgggtcaccctggccaacttcgccggcagcgtggccgtcgcctacttcttcggccacctgctgggcctgaccgaaggcgcgtttttacataagacgctggcgatcgcgcaggccaaagtggatgcggacttcctgcacgccttcatctccggcgtcggctgcaactggctggtatgcctggcggtgtggttagccttcgccagcaaagatgtgccgggcaaagtgatcggcatgtggttcccggtcatggcttttgtcgccatcggcttccaacacgtggtggcgaatatgttcatcatcccggcggccatctttgccggcggcatgggctgggagcagtatctgcctaatttcgtcgcggtatttctcggcaatgcgctgggcggcgccggctttgtcgggctgatgtatttcctcgcctatcgccccggtttgccggccagcgaacacgcctgacaaccgccatgaaaaaagccccgagattgctcctcggggctttttctttatggacagcgtatcagcctaatcaggcctgcgcttcacgctcggcgatataagccagcgccatatcgatgcgctgcagcgaacgcttctggccgatcgcatgcacggtcacgtccatgcccggcgactgaccggcgccggtcaccgccacgcgcagcggcatgccaaccttgcccatgccgacgcccagctcgtccgccgtaccctgaatggcatcatgcacattttccggcgtccagacggtgatggcggccagcttggcgcgcaccgcttccagcggctgacgtgcaaccgggcgcaggtgtttcttggcggcgtcggcgtcgaactcgctgaagtcttcgtagaagtaacggcaagactccgccatttcctttagcgtcttgcaacgctcgcccagcagcttgacgatgtccttcagttccggaccgttgcgggtttcaagacccagttgctcaacgtgccacgccagatgcaccgccacttcttccgccggcatatggttgatgtagtgatggttcagccactgcagcttctcggtgttgaacgcgctggcggatttgttgatcgcttccagcgtgaagaactctttcatctcgtcgatggagaagatctcctgatcgccatgggaccagcccagacgcaccaggtagttcagcagcgcctgcggcagatagccgtcgtcgcggtactgcatcacgcccacggcgccgtgacgtttggacagctttttaccgtcgtcgccgaggatcatcgacacgtgcgcgtattccggcaccggcgcgcccagcgctttcagaatgttgatctggcgcggggtgttgttgatgtggtcttcaccgcggatcacatgggtgatttccatgtcccagtcatcgacaacgacgcagaagttataggttggcgaaccgtcggtgcggcggatgatcagatcgtccagctcctggttgctgaattcgatcgggccacgaattttatcgtcgaagatcaccgacccttcctgcgggttgcggaagcgcaccacgtgcggttcgtcgtcggtgtggctgcactggctgtcgcggcagtggccgtcgtaacgcggcttttcgccattttccatctgcttctcgcgcagcgcttccagacgttccttggagcaatagcatttataggccgtgccctgctccagcatctcatcgatgaccgcgttgtagcgatcgaaacgcttggtctggaaatacgggccttcatcccaatccaggttcaaccagttcatgccatccataattgcgtcgatcgcgtcctgggtagaacgttccagatcggtatcttcgatacgcagaacgaactcaccgcccgcatggcggctgaacaaccaggaataaagtgcggtacgcgcgccgccgacgtgaagatagccggtcgggctcggtgcaaaacgggttttgattttcattgggttcactgccttattacgcaacgcgtgtcggcggttgccgacgattgctcggaattgaaaaaagagtggacgacattgtatcaccacgcgctaattcctcaacgccgacacgatattgcaccggtcgatttcgcgcgttttgcggcgagtttcgcatagcatcgcgcaaagaatcggcgctgctggcgattattatcgcgccctgcctaaatttgcggcgaacgattgaaatcattttaaaaaccgttgactcactttgaactatccctataatgcgactccaacaagacggggcgattagctcagttggtagagcatctcctttacacggagggggtcggcggttcgagcccgtcatcgcccaccatcttgttgagaaaaatgagaacgaatgagggtgattagctcagttggtagagcatctcctttacacggagggggtcggcggttcgagcccgtcatcacccaccatcattctctcgtttagcagtaacctggaagtcctgaagtgggtgattagctcagttggtagagcatctcctttacacggagggggtcggcggttcgagcccgtcatcgcccaccatcttgttgagaaaaatgagaacgaatgagggtgattagctcagttggtagagcatctcctttacacggagggggtcggcggttcgagcccgtcatcacccaccactgttatgggtcgttagctcagttggtagagcagttgacttttaatcaattggtcgcaggttcgaatcctgcacgacccaccaattcagaaaaaagcgccttttggcgcttttttcgtttctgcgccacctgctcccgacttcatcttctcgcaggcatagtttaccgagtcgtgcaggatgaagaaccgtagaggttcgagcatcgcgcagcgatacgacaacgcgcagcgttgcccgcagggtgaggccacaggccgaatcaatcctgcacgacccaccaattcagaaaaaagcgccttttggcgcttttttcgtttctgccgttcgcctccctttcttcttattcaccacgcgctgagatacgaatggttatcattttggcggcttgaatggtaaattagccggcatccaccacacagccaatcctcagccggattgatacaccttagttcaaggaaagaaagagcccgctcatgaccctatccttacgccagctgttcattgcatttatcgccacttccagcctgttgctcagcggctgcggcccggacgacaagagcgacggacagaaaccgtccgcccccgcagccgacggcagttggccgcgcaccatcgacagcgtcaaagggaaattcacgctggaaaaaccgccgcagcgcatcgtgtccaccagcgtcaccatcaccggcacgctgttggctatcgacgccccggtggtcgccagcgccgccaccagtccaaatccgctggtggccgataaacaaggtttctttacccagtggagcgaggtggccaaacagcgccacgtcgagcggctgtaccaggtggagcccaatgccgaggccgtcgccgccgccgcgccggatttgatcgtcgtcgccgcgaccggcggtgattcggcgttgaaactttatgaccagctgtccgccattgcgccgactctggtgctcgactatggcgacaaaagctggcaacagctggccagcgagctcggcgagatcaccggtcatgaagccggcgccaaacaggcggaagatcgtttcgagcagcgcgtggagcaagtgaaacaggcgatcgcgctgccgccgcagcccaccactccgctggtgtatgccgacaacggccgcgaggccatgctgtggacgccgggttctgcccagggcaaactgctgacccagctcggcttccaactggccaccccgccggaaagcgccaaaggcaacaccagcatgggtaaacgccatgacatcatccagatctccggcgaaaaaatggccgaaggtctgaatggcaaaaccctgatcctgttcgccaccaatgagcgcaaagtgcaagaggtgctgaccaacccgttcctcaaacatctggagccggtggaacagcggcacgtctacgccgtcggcaacgacaccttccgcctcgattactacagcgccaccaacatgctgaatcaaatcgaacggttgttcaaaaagccctgaatcacgccgtcggcaggtcagccccctgccgacactttccgcaagcggggcgaacgttcacattcaatcaattgaaatatcaatagttattaacattgtccacgcacctttgccaccaaccggcgggtgcatgcgggcgtaaactcgtgctactattgccccgcatgaacgcaaataacaatgagaataaaaatcatacaggagttaccggtgtgaacgtacccactccgactgagcggacgctttcgtccgcaccgcacgcagcttacgccagtggcttcaaacgcatcgccgggttcggtatcggtttggcgctgttgctgctgtgcatcatggccagcctgatgctgggttccaaagccatccccttccataccgtctggctcagcctgcagggcgccgcgagcggttccgacagcaccatcattctcaatgcccgggtgccccgtacgctggcgggcatcctggccggcatggcgctcggcgccgccggcgcgctgattcaggcgctgacgcgcaacccgctggccgatcccggcgtgctcggcatcaacgccggcgccagcttcgccgtggtcatcggcatcatgtttttcggcgccgccaccaccgaaagctacatggcctacgcctttgccggcgctgccctcaccaccctgctggtctacctgatcggcacgctagcgggcgggcgcatcaacccggtgcggctgacgctggccggcgtggcgatcggcgcggtgctgctcggcatcaccaccgggctgtcgctgatcgatccgcaaaccttcgaccaactgcgcttctggcaggccggcacgctggatatccgcacgctgtccacgctgccggtcaccgcccccgccattttgctcggctgcctgctgacgctgctcatcgcccggccgctgaataccatcggcatgggggaagatctggctatcgcactcggcgcgcgcgtggtgctgactcaggtgatcgcggtgatcgccatcacgctgctgtgcggcgcggcgaccgccaccgtcggcccgatcagtttcatcggcctgatggtgccgcatatcgcccgctggtgggtcggccccgaccaacgctggatcctgccctactccatgctgctggcgccgattttactgctgtgcgccgacgtggtcggccgcttgctggcggccggtgaactgcgggtttccatcgtggcggccttcatcggcgcgccggtgctgatctggctggtgcgccgcaagaaaacgctggggggtctgtgatgagtctgccgcatacgctgcatatcggccgcccggacggcgtcatcaacgggcgcctgccgctgcgcctgctgctggtcaacctttcactgttggcgctgtgtctggcgatggccgtcgccgccctgtgctacggcacgctgcaactttcgctggagcaggtttttgccgcgctgaccggcgaggcgccgaaaaacctggtcaccgtggtcacccaatggcgcttgccgcgcatcgccatggcgctgctgttaggcgccgcgctcggcatgagcggcgccatcttccagtcgattatccgcaacccgctcggcagcccggacgtgatcggctttaacatgggggcttacaccggcgcgctgatcgccatcaccctgttcaacggcggctactattacatcgccggcggcgcgctggccggcggcattctcgccgcgctggccatctatctgctggcctggcggcaaggcatcgccggcttccggttgatcatcgtcggcatcgccataagcgcggtgctggtctccaccaacacctggctgatcatcaccgcctcgctcgagcgcgccatggacgccgccatgtggcaggccggttcgctcaacggcatgacctggcaaaaagcccagcccgccacggcgttcatcgtgctggcggccgcggccgcgctgctgatgggcaaacggctgcagctgctggaaatgggcgatgacacggcgcgcgcgctgggcgttaacgccgaaggcagccggctgtggctgatgctgttcggcgttaccctcaccgccgccgtcaccgccaccgccgggccgatttcctttatcgcgctggcggcgccgcagatcgcccgtcgcctcgccggccaatcctcggtcaccctgacctcctcggcgctgatgggcgcggcgttgctgctcggcgccgacgtggtgtcccaacatcttttcgcgccgatccaactgccggtcggggttgtgaccgtctgcatcggcggcctgtacctgatttggctgctcatccgagaggcccgcagataatgaagagtgataatgccatgagccaccgcctgcacgcctcgcacctgaagctgggctacgacaataaaatcatcgctgacgatctgagcgtggcgatccccgacggcgccttcacggtgatcgtcgggccgaacgcctgcggcaaatcgacgctgttgcgcgccctgtgccgcctgctgaaacccagcgccggcgaggtgatgctggacggcaagaacatcagcagcttcgccaccaaggcgctggcgcgcgagcttgggctgctgccgcaaacctcgatcgcgccggacagcatcaccgtggcggacctggtgtcgcgcggccgctatccgcaccagagcctgctgaaacagtggacgcaggccgacaaacaggcagtggaagccgccatggcggccaccaacgtcagccagctggcggatcgcagcgtcgacgagctgtccggcgggcagcgtcagcgcgtctgggtggcgatggcgctggcgcagcaaaccccgctgctgctgctggatgagccgaccacctatctggacatcgcgcaccagatcgagctgctggatctgttccgccagctcaaccgcgagcgcggtcaaaccctgatcgcggtgctgcacgatctcaaccacgcctgccgctatgccgaccacatcatcgccatgcgcgacggcaagatcgtggcggaagggaaaccggcggagatcattaccgccgaactggtggagcgggtgttcggcatgccgtgcatgatcatcgacgatccgctgtcccacacgccgctggtgatcccgcgcggccgctaccactgcgacgcgccgcaggcatgaaaaaggccgggttaccccggcctcttggttatttctccagcgacacctgtttgaagatgtgtttgccgaacgggtctatctcgtagcctttcacttccttgcgcaccggttcgaagatggtcgagtgcgcgatcatcagcgccggcatctgatcgtgcatcaccacctgcgcctgctgatacatcgccacccgtttggcgtgatcgttctcctcgcgcgcctgcaggatcaactggtcgaacggtttgtagcaccatttcgccgagttggagccgccgagcgaagcgcaggtgaacagcgggccgaagaagttgtcaggatcgccgttggcggtggtccagcccatcagcgcggtctggtgttcgccgtttttaatccgctgtaaatactcgccccactcgaaggtgacgattttggcgcgcacgccgattttggcccagtcggcctggatcatctccgccatgcgcttggcgttggggttatagggccgctgcaccggcatcgcccacagatcgatatcgaacccctgccccaacccggcctcctgcaacagctgcttcgcccgctccggcgaatacggataatcttcaagctgcgcgttgctgccccattgggtcggcggcagcagattcttggccggctggccggcaccgtggaacaccgcgtcgatgatcgccggcttgttgaccgccagcgccaacgcctggcgcaccttgacgttatccaacggcttcttctgggtgttgaacgccaggaagccgatattcaggccggatttttccatcacctgcaggttgccgtcctgccgcatgcgcgccagatccgccgggttggggaacggcatcacctggcactcgttcttttgcagtttggcgtaacgcaccgtcgcatccggcgtgatcgagaacaccagccgatcgatcttcggtttgccttcccagtagcggtcgaacgccttgtagagaatttttgcgtccttctggtactgcaccagctggaacggcccggtgccgatcggatcgttgtccacccgctgcggcgtgccggccttcagcatcgcgtcggcatattccgccgataaaatggtggcaaaatacatgcccagatcggcaacgaacggcgcctcggcgcgggagagctcaaagcgcacggtgtggtcatccaccttgacgatccggtcaatcagcgtgccgaactccatcgactcgaagttggtgtaggcaccgttggagaccttgtgatacgggttgttggcgtccttctggcgcataaacgagaagatgacgtcatccgcgttgaaatcgcgggtgggggtaaaatatttattgctctggaatgccacgcccttgcgcaggtggaaggtatagcgcttgccgtcttcgctgacctcccagctttccgccaggctgggttgcagctcgacggtgccgggtttgaaatccaccagccggttgtagatcgccgccgagctggcatccaccgtggtgccggaggtgaacagctgcgggttgaagccttccggcgagccttcagaacagtagaccagcgtattggcccgcgcgccgccggcaatcgccaacgccagcagcccgatcgttattgcttttcttttcattgcgctatccccagtggtgaaaaaacaacccaacggatagcaataaatcatgcagttagcgatgtaaaggacaaattccgcgcataaaaacgggcaggcgcgcaagccgcctgccctggtgaaaccacgcgatgatgaaattaaatcatctggctgaagttcatctgcgccatcagcttatagttgtcggcgtagtcgaccggaatggccaccaccaccggcccctggatcgccatcgccttgcgcagcatcggccgcagatcgtccaccgactgcacggcgaaaccgaccgcgccgcaggattccgcataggccttgaagtcaatcggcccgaactccacgccggatttgcgctggtatttgttcacttcctgcatctccaccatgttgtaggcgttatcgacccagatcacgtgcacgatgttgtttttcagccgcaccgcggtctccagctccatgctcgactgcatgaagccgccgtcgccggagatcgacaccaccttgtcgccggggcgcaccaacgccgcgccgatggcccacggcagcgccacccccatggtttgctggccgttggagatcaacagctggcgggcgcggaagctgtaaagatagcgggcgatccagatgtggaaactgcccatgtccacgcacagcgtcacgtcgtcgctgacgatgtcctgcagctccttgacgatgcgcagcgggtggatcggcatgccgccgcggcgcgcggcgcgctccgccagttctgtgcgctggcggccgagatcggtgaggatcagctccacctccggcggcacgcagaccgcctcattgaacgtttcggtcatcatgttcaacgtggcgctgatgttgcccaccagttcgacgtccggccgatagcaggtgtcgatatccgccggcagcacgtcgatgtgcaccagtttcagccgcccatgactgttccacatgcagggatcgtattcgatcggatcatagccgacgctcaccaccagatcggccttctgcaacagctgatcggccggctgattgttgaacaggccaacgcggccggcgaaacgggcgaagtggttgacgtcaatcacccccgccgcctgataggtgccgaccaccggcatgtgggtgcggtacagcagatggcgcaccgcctcgctgttctccggccggctggcctgcaaaccgagcagcaataccgggcatttggcctggcggatcagcttcaccgccgcctggatgtcgtccgccgccgcggcccccatgcgcggcaagcggcagccggccaacaccggcgcgctgaccggttcattgacgatatccatcggcaggctgacgaacgaggctcccgggcggccgaactcggcgcggcggaaggcgttggcgatcacctcggaaatcgccgaaccggcgtgcacttcggcgcaatacttggtcaccggccggaacatgctgacggtatccatgctctggtgtgtctgcttcaggctgtcggcgcgcttcaccgccccgccaaaggccactaccgcgtccccctccgaggtggcggtggccagcccggtgatcaggttggagctgcccggcccggaggtgaccagcgccacccccgccttgccggtcaagcggccgaccgccgccgccataaaggccgcgttggcctcatgccgcaccaccaccgtttcaatcgatggcgcgtcctccagcgagtcgaacacccggtcgatcttggcgcccggaatgccgaaaacgtgtttgacgccctgtgcttccagatttttcaccaccaaatcggcgccgcattgccagtcattgcctgttttttcctgtgccatggttccacctcctaagaaaacgatcgccggggttagccctcggcggaacgaatcgcgcgatccaaatcctctgggcagaggttggcgcgcaagaaatccgcatcatgcggcaactgaagattgagacgggtgatgacgccgaactgcaggcggccgtgatcgagctggtagtccagcacgtggccgccgccgctgcggtcgtcggtaacgaagtgttcgtgatagccggccacgccgatgccctgcatgtaatccggcgagcggaagccgaccagcgtgccgcgccgttgatgaaacgagaaggtcggctgctcttctatcgcttccagcatcgggcgatagggccgttcctgacgcggcacggtgcgggtttccacgtggctgaactcaccgtcgacccgcaccgcgcaaaacaggttcggcgaggcgacctgttcatcgatgcattggtgcagctgcgccttggtgatcggccggtcgaactgctggctgatactgggctggaaaaaggtgacgacggcgaaaggggttttctgttgcaaaccggctgggcgggcgctgccgtcggcgcgtagctggtgtatttcctggtcgaaagcgatcagttcgccatccaggtgattgaaggtgccgaggccgaaatcaccgtgtttgagcaactcggcaatggtggtttcaccctcgtagaccccgtcgatgagcgcgctcatcagcgagatttgatagatttcgccctccccggcgttgatcgactgcctggcaaaaccctgcgccaaatggcgcgcacaggaacacccgtgtttttcgttcatgactcactcctccaccagcgcgggatcgcgattccgcgcgttcaaaagacccaccgacggtgggccaagatgccccccaaggcgcgttcatcagttggaacgattcagcctgaggcgacaaaaaaaccggcacggctggccggccgatatccagaacccacggcatgacgtgtgaaagtaaaggctcactaatcattaatgccgagtcggatatcaaattgaacggttaatctggtgttggagcgacaatcaactccgcaggcggctcatgcagcctgggaaaaacatctgttatttagtgctaagcgccgcgaggtttatgcgttttctctctatacggccgggatgcagcggcgttgaagcccgccgtcaacccgcagccagagtagccgcagcaccgtcgacagagaagcgggtattcataagaaacgcttttgcatataatgcaaaaatgaatgacgcccgttatgttgaacatctgccgatctttctcgacgtggcccgcttgggcagcttttccgccgccgctcgccggctgggcatggtgccctcctcgctggtgcgccatatcgacgccttggaaagcgcgctcggcgccacgctgttcgtccgctccacccgtgggctgctgctgaccgacgccggcgagctgctgctgacgcgcgccgccgcgctgatgacggacattaccggcattcacgccgagctgaacgcgctgaacgaaacgccgcagggcacgctacgcatcagctgcctgccgaccttcggcaaaacctatgtgctgccgctgctgccgacgctggcggaacgctatccgcagctgtctatcgatctcgatctgaccgaacgccagaccgatccgacgcaggaacggctggatgccgccctccgcatcggcgaacagaaggacagcgcgctgtacgccagccgtatcgccacccaacgctgggtgatgtgcgccagccccgcctacgtcgcccgctatggcctgccgagcgatctggaagcgttgccgcagcatcggctgatcgcccgctaccacaaacagcagccggcctgctgggcgcagatcctcgacgcggcgctgatgagccgctgcaccatggcgctgcgctgcgacgacttcaccgcgcagcgccaggcggcgctgctcggcctgggcatcgccttcctgcccaactgggtggtgggaccggacgtgcagaatgggcaactggttcagatgctcgaagatccgcgccatgagcagcaaggcatctatctgctgcgcccgatggcgaaggtgtccgcccggctggcggccttcaccgccctgctgcagcaaaccctcggtcagccgcccagctgtgggtaaagcggagtgacgcggccgcgcagcgccggattgtcgctctcgtccttcagctcgatgccgctcagccgccgccggcacgcctgttccagcagccaggccaatttgaacgccgcctgcggataatccagcccctccggccgcacattggagatgcagttgcgctctgagtcccttctgcgcgcgttcggctcccaggtcagataaacccccaggctgtccggcgacgacagccccggccgttcgccgatcagcaccgccaccgcccgggcctgcaggcattcgccaatctcatcccccagcgccactcgcgcctgatgcgccaacaccaccggcgcgatcgccagccccaatgtatcgagatagggccgcagcgcctgcagcagcggcaatgcctggcggtgcaccgccttggaagaaaggccatccgccaccaccagcagcagatcggtccggcgcggcggcacgccgagcagcaggcggcggctgtccggcgccaatcgccgccccagatccggacggcgcagataggcggcgcggtcggcggcctggctgtgcaccgccagcgtgggccaaccggcatcgtgcagatccgccgccagccgttcgctgtcgaaaggctgatgcaccgcgtcgcgcgcctgggcatgggccaggccgaagcgcagcagctcgtcggtcggcaggctggcgccggtgcgccccaacgcgatgcgcgcgtcggtaaaggcgcgcagcgagtcccaactgttgacgtgaaccggtttgctcatgtccgttctccctgcagcgccagcaacagcgggtgattggcggcggcgtcgcgcagccgcccgcgctcgtcggtgatgttcatcgccgccagccaggcggcgaactccggcgcgtgcttcagccccagcagttcgcggatatagagcgcgtcgtggaacgaggtgctttggtagttgagcatgatgtcgtccgcgcccggcacgccgatcaggaacgtcagcccggcggcggccaacagcgtcagcagcgtgtccatgtcgtcctgatcggcttcggcatggttggtgtagcagacgtcgcagcccagcggcaggccgagcagcttgccgcagaaatgatcctccagcccggcgcggataatttgtttgccgtcatacaggtattcggggccgataaaccccaccacggtattgatcagcagcggcgagaaatggcgcgccaccgcataggcgcgcgcctcacaggtctgctgatcgacgccgtgatgcgcgttggcggacaggcaactgccctgcccggtttcgaaatacatcacgttatcgcccagcgtgccgcgcctgaggctcagcgccgcctgctgcgcttccgccagcagcgccagactgatgccgaaaccgcgattggccgcttcggtaccggcgatcgactgaaacaccagatccaccggcgtgccgcgctccatcagccgcagcgtgttggtcacgtgggtcagcacgcaggattgggtgggtatggcgaagcgctggatcacgtcgtccagcatgtagttgagcttttccagcagcggcaggctgtcgctggccgggttgatgccgaccaccgcgtcgccgctgccgtacagcagaccgtccagcatgctggcggcgatgccctgcaggctgtcggtcgggtgattgggctgcagccgcacgctgaggtggcccggcaggccgatggtattgcgaaagcgcgtcaccacccggcatttcttcgccaccaggatcagatcctgattgcgcatgatcttgcttaccgctgccgccatctccggcgtaatgccggcggccacctgcgccagcatggcgctgtccgcctgctcgctcagcagccagtcgcgaaaatcgccgaccgtgaggtgcgagatgggctcaaaggcggcggcgtcgtggctgtcgataatcaggcgcgtcacctcgtcctgttcgtacggcaccagcacctgctgcaggaacgccttgagcggcacatccgccagcgcgatgcgcgccgccatgcgctcttcggcgctctccgccgccacctccgccagataatcgccggaacgcgccggcgatgctttcgccatcagctggcgcagatcgccaaagcgatagccgcgttggcccaccgttgcctgaaacatagccccctcccttgccctgcgtgacgagataaaagccctgcaccaagtgtagtcagtgggaaaagaaaattattttgcacgcgatcgccgccatcacgctttcccccatttcacccgttgccgcttcgggttacagtagccgcgaaaacaggaggggtgatggatccgcaacggcaaattatcgactggctgcaacaagataacgcacgcatggccgccctgcgcaccgtgcgccggctcggcttgaatgactggtgcctcggcgccggctttgtgcgcaatctggtgtgggatcggcgccatggctatacggagcccacgccgctcaacgatatcgacgtgatccacttcgatgcggagcgtgcggacgctgagcgcgatcgcatgctggaggtgcgtttgcaacagtggctgccgcgaccttggtcggtcaagaaccaggcgcgcatgcacctgcgcggcggccgggcgccttatcgcgacagcgaagaggccatcagcttctggaccgaagtggaaacggcgatcggcgcgcgcctgaacgccgacgacagcatcacgctggtggcccccttcgggctcgcggcgctgttcgacgacaccattacctttaacgcgaaaaacggcgatcgcgcggcctatgcccagcgcgtgctcgacaaaggctggctgcagcgttggccgcgcctgcggcaggtaaagatttagccgccgctgccgataccctgaacagcgatataccgactcagggagagcattcatgtcgaccaccatcaccatgatcgtaccgatcaaaaataccgttcccggcgtcagcaacgtgttcagcgcgccgggccatcagggcgaattgctgatggccaaaccggtcaacaaccagccgcaaggcggcaagatggagaaaaacgaacgcgccaacggcaatgacgaaccggtcaacctcaatgaaagccgcgcctcggcccgcatcaaggcgctgaaccggcagattcagtcgctgcagcaaaagttggtggagctaaaggactccgacgccgatcctaaggaaatcgaaaaacagaagcagctgatcgaagcgcagatcaagatgttgcaagccgagatcgcgcgcatccagaaagaagaaatggaaaagcaacagcaggagcagatggcaaaagccgcggcgcaagctggcgacggcgtaaaccgcccaacgccgctcaacgccgtggacgtctatatctgagtcaatatgccgcgttttcccgccggcgctggtgcagcagcgccgcctgctgacgcgccacctgccagatggcctccgccgccggcgtcagtgagcggttcttacgccgcaccagcatcagcgcgcggttaatttccggcaccagccgccgcacccggagccgacctccttccggcaacggcagcgccaacgccgggaaaatgctgatgccaatcccctccgccaccatcgggaacaacgtggccggatggccgatttcctgcaccacctgcgcctccacgccctgctgcctcagcgcactgtcgatcagcggccggctgcccgacgcatagtcctgcaacaccaggcggcagccgtttagcgccgaccaacgcacctcttgctgctcagcaaacgggtgatcgtcgcggcacagcagcagaaacggttcatgcagcaccgcttcgcactccagatccaccgcctgcaccggatcgaccacgataccgaaatccacctcggcgttacgcacgctgtgcagcacctgctgctgcgcctgatcgcgcagcatgatgcggatctccgggtattcacgctcgccggcggcgatgcactgcggcatcagatgggcggaaatggtttggctcgtcgccacccgcaccgtgccgctgcgctgtacgccaaagctgcgcacatccagcagagtggtctgcagctcgtccagcaaccgttcgacccggttggccagccgcaggccggcatcggtcaacaccacttcacgcgtggtgcgatccagcaggcgcacgccgacctccgcttccaactctttcacgctgtggctgaccgccgattgcgtcaggccgatcgcctcaccggcgcggctgaagctgccgtggcgggcgatggcgacgaacacccgcagctgtttgagtgagtaattcatgtgttttattcatatatgaattaaataaatcaatttaattattatatgtccgcgcgggagaatagccctatcgattttcgaccctgagcgcaccgccatgagatttctgcccgatcgttttaccctgacgctgatcgctaccgtgctgctggcgtcgttcctgccggcgcgcggcgagttcgtcggctggctcaacgccctgaccatcgccgccatcgccctgctgttcttcatgcacggcgccaagctgtcgcgcgaggccatcctggccggcagcaacaactggcggctgcatctgtgggtgatgttcagcaccttcatcatttttccggcgctgggcatgctgttcgcctggtgggcgccgatcgacgtcagccccgagctgtatgccggtttcatctacctgtgtatcctgccggccaccgtgcagtcggccatcgccttcacctcgctggcgggcggcaacgtggcggcggcggtgtgcagcgcctccgcttccagcctgctggggatcttcgtgtcgccgctgctggtcggcctgctgatgaatgtgcacggcgataccggcagcctgcggcaggtgggctcgatcgtgctgcagctgctggtgccgttcgtcgccggccacctgctgcggccgctgatcggcggctggatcgaacgccatcggccgcttatcggtaaaaccgatcagacctcgattctgctggtggtgtacgccgccttcagcgaggcggtgacgcacggcatctggcatcaggtagggatgggctcactggcgtttatcgtcggcggcagcatcgtgctgctggctatcgtgctggtggtaaacacttacatggcgcgctggctggggttcagcaaagcggacgagatcaccatcgtattctgcggttcgaagaagagcctggcgaacggcattccgatggccaatatcctgttcccgacggcgacggtggggatcatggtactgccgctgatggtgttccatcaggtgcagttgatgacctgtgcagtgctggccaaaaggtatcagcgcaagcagcgggcacaacaggcagtgcccaacgccaacgcgcaggcgtcgcgcgggtaaaaaaaaagacgggccgaggcccgtcagttcagcttttcttcaacggcttgaccaggtggtcaagcccttcgattttaatcgccagcgtcatctccatcagcatgccgagcttgcctttggggaattcacccttgcgggcgaaccacagcaggtactcttcgggcagatcgatcagcacccgcccctggtacttgccgaacggcatcacggtattggcgatctccagcaggttttctttttccatcactcacccagcaggcggatcatctccgcttcgtcgatcacggcgatacccagctcctgcgccttcgccagcttggagccggccgcctcgccggcgatcaccagatcggttttcttcgacacgctgccgctgaccttggcgcccagcgccgtcaggcgatctttggcctcgtcgcgcgacagctggctcagcgagccggtcagcaccacggttttgccggcgaacgggctgtctatctcttccgccaccaccaccaccggcgccggccagtggatgccgatctcggcccccaccagctcgttgatcacctgctgattgagcgcttcatcgaggaagttgcgcgtgtgtttggccaccacttcgccgacatccggcacctctttcagcgcctcaatgtcggcggcgaacagcttctcgagcgatccgaaatgcgcggccaggttggcggcggtcgcttcgccgacctcgcgaatgccgagcgcatacaggaaacgagcgaaggtggtctgcttggatttctccaacgcgttgaccagattctgcgccgatttcggccccatgcgatccaggccggtcagaatgccggcggacagccggaacagatcggccgggttcttcacgtactccttgtccaccagctgctcgatgatcttgtcgcccatgccttcaacgtccagcgcgcggcgggaaacgaaatgctttaacgcctctttgcgctgcgcgccgcagataagaccgccggtgcagcgcgccacggcctcgccttccacgcgctcaacgtcggaaccgcacaccgggcagtgcagcgggaacaccacttcgcgcgcatcatgcggccgacggtcttccagcacgcccaccacctgcgggatcacgtcgccggcgcggcgcacgatcaccgtatcgccgatgcgcagccccaaccgctcaatttcatcggcgttgtgcaaggtggcgttgctgacggtcaccccggccaccagcaccggctcaaggcgcgccaccggcgtaatcgcgccggtgcggccaacctgaaactccacttcgcgcaccacggtgatctgctcctgcgccgggaatttgaacgccgtcgcccagcgcggcgcacgcgccacgaagcccagcgtttcctgcagatcgatgtcgtcaatcttgatcaccacgccgtcaatatcgaaaccgagctgtgcgcggtcccgctcgacctggcgatagaacgccagcacttcctcgctgccggtgcggcgctgggcgcgatcgctgaccggcaggccccaggccttgaactgcatcaggcgctcaaagtggctgcgcggcagctcgccgccttccagcaggccaacgccatagcagaagaaggtcagcgggcgtttggcggtaatgcgcggatcgagctggcgcagcgagccggcggcggcgttgcgcgggttggcgaataccttgccgtctttgcgccgggcttcttcgttcatctgttcaaacccggcctgcggcatgaacacttcgccacgcacttccagccggcgcgggatgttgtcgccggtcaggcgcagcgggatggctcgaatggtgcgcacgttggaggtgatgttctcgccggtggtgccgtcgccgcgcgtcgccgcgcgcaccagctcgccgtcttcatacagcaggctgaccgccaggccgtccagcttcagctcgcagcagaaggtcagcggatcgctgcttttgagcctgtcctgcacgcgcttgtaaaacgccaggaagctctcttcgtcaaacacgttgtccagcgacagcatcggcacttcgtgacgcacctggtcgaacgccgccagcggcgccgcgcccacgcgctgggtcggcgaatcggcggtgatcagctccggatgcgcgctctccagctcgcgcagctcgcgcatcaggcggtcatattccgcatccggcacttccggcgcatccagcacatgatactggtattcatgatggcgcagtgtggctcgtagttgattgatttgttggattatcgattccatggctcaccatcaaagataaaaaacccccggctagcgggggctttgttgttacggatgttcagtgcgcgcggcaatccggtcaggcgttgttttccaacacttcacggatacgcgctttgtaggtttccagcttctgcggcgtcatcatgcgacgctcgtcgtccagcaccacgccgcccacgtcgtcggcgatgcgctgtgccgactgcagcatcagcttgaagttctgattggcgtcgccgtaagacggcaccatcatgaacatcgacacgcccggtgtggagaagtcggacatcatgtcaggatcgaacgaccccggcttgaccatgttcgccaggctgaacagcaccgggccgctgccggccgggctgatatggcggtggaagatgcccatctcgccaaactggaagcccgcctgcaacacgctctgcagcagcacttcgccgccgattacgccgccctgatgggccgcgacgtgcagcaccagcacggtctctttcagcttggcctgaattggcgcagccgccggctgttgtggctgtggcgcaggctcctgcgccggcttcacttccggcgcgggctgcacaggggccggctcggcgtggaatgccggttcagccccctgcggcgcctcatgttcatgcggcagatcgtcgacgcgcggctcacggcgcgcggccggttgcggttgctgcggttcggccggttcttcgtccggcgcgtagttgttcagcaggatgtcatcgtactccggccgctgagacagcggaggcggcgtctgatgagcagtcggctgaacggcgcggggcgcaggcgcagccgccggagcgggcttcggcgcggccacgggttcttcgcgtgcggcatcgaaatggccgaatgacggctcgtcttgcgggtgagcggcgcgtacgcgcacctcaccgacgccttcttcgagatcgtcgttcggagtttgttcacgttccttttgggaacgtttggctgggcgatcgcggaagagcgctgaccgttctttgcgactggtccacagaccgtgcaataacagcgctattatggcgatcgcgccaacaacgattaatatcagacgcaaatcctgcatcattgctatctctgttgttccaatacattgccaccgcggcaaacattcactctttaactctatttgcccgcgcacacaagtgcaagtccgtgctgaactttatgccaataaagatgattatactgcctttttctgctggtttttcagccaaccctaccctagccagtggaaaatcatccctatatgataatgatgcctgttcagacaacgagataacttaagatatgtcctatacgcagccctctccccgatcgaccagcggcattcactatttcgccgaaggctggcgtctgatttcgcgcccggggattaaacgctatgtggttctgccgttgctggtcaacgtgctgctgatgggttccgctttctggtggctgttcagccgcctcggcgactggatcccggcgatgatgagccacgttcccgactggctgcaatggttgagctacctgctgtggccgctggcggtcatttcggtgctgctggtgttcagctatctgttcagcaccctcaccaatcttattgccgcgccgttctgcggcctgctggccgaacagctcgaaggcagcctgaccggcaaaccgctgccggacaccggcctgctcggcatcgccaaagatctgccgcgcatcatggcgcgcgaatggcgcaagctgatgtattacctgccgcgcgcgctgctgctgctggcgctgtacttcgtgcccggcatcggtcaaacggtggcgccggtgctgtggttcctgttcagcgcctggatgctggcgatccagtattgcgactatccgttcgacaaccacaaggtgagctttgccgacatgcgccgcgcactgcgccagcacaaaaccgacaacctgcagttcggcgcgctggtcagcctgttcaccatgatcccgatcctcaatctggtgatcctgccggtcgccgtctgcggcgccaccgcgatgtgggtcgatcgctaccgctcgcaattcgtccgataaccgccgttttttgccgccgatagcgcggaaattttcgacagggcgcgcatttcgcgcccttatcattgtgcttaaaacttatttcctaataacatatagatataccaattctttacttccctgccggtactgttagcgtatgctttcgatgttccccacattttcatagagttaaaggacgggctatgagcaagatatatgaagacaactcattaacaatcggccatacgccgctggttcgtctgaaccgtatcggcaacggacgcattctggccaaggttgaatcacgcaacccgagcttcagcgtcaaatgccgcatcggtgccaatatgatttgggatgcggaacaacgcggcgtgctgaccgccggtaaagaactggtggagccgaccagcggcaacaccggcatcgcgctggccttcgtcgccgccgcgcgcggttacaagctgacgctgaccatgccggaaaccatgagcatcgagcgccgcaagctgctcaaggcgctgggcgccaacctggtgctgaccgaaggggcgaaaggcatgaagggcgccatcgccaaggcggaagagatcgtcgccaccgatccgaaccgttacctgatcctgcaacagttcagcaacccggccaacccggccatccatgaaaaaaccaccggcccggaaatctgggaagacaccgacggggaagtcgacgtgttcatctccggcgtcggcaccggcggcacgctgaccggcgttagccgctacatcaaaaacaccaaaggcaaagccatcaccaccgtggcggtagagccgaccgactcgccggtcatcagccaggcgctggccggtgaagagctgaagccgggcccgcacaagatccagggcatcggcgccggcttcattccgggcaacctcgatctggatctggtggatcgcgtcgagaaagtctccaacgacgaagccatcagcatggcgcgccgcctgatggacgaagaaggcatcctggcgggcatctcctccggcgcagcggtcgcggcggcggtgaaactggccgaagaaccggcgttcgccgacaagactatcgtggtcatcctgccctcttccggcgaacgttatctcagcaccgcgctgttcgccgatctgttcaccgagcaggaattgcagcagtaattccgccactgcacaaatcgctaaaaaagcaccctgtagggtgcttttttgtggactggatcaaactttatagcagtccaagattgcttttgcccgtcgcctttagtatttaacggtgcattatttcgatgcgcaaaattaatcactctccgagcccggtcgaggctgaatcgatttactcatctgtcgccgacgcggcgaatcgggcataatggggagcggattggaacgacgtctaaagccgagttttttgatctgaagtgcctaacgcgtcgttttctgttgcatcaacgttcgcccctgtccatagtcaggcgctataaccagacaagttaaagtcagccccctgggctaaactttaactccacaacattaatccaataagttggggaaacatcaatgttccagcaagaagttactattaccgctccgaatggtctgcatactcgccctgccgctcagttcgttaaagaagccaaaggcttcacgtctgacatcaccgtgacctccaacggcaaaagcgccagcgctaaaagcctgttcaaactgcaaactctggggctgactcaagggaccgtagtgaccatctccgctgaaggtgaagacgagcagaaagccgttgagcacttggtaaaactgatggcagagcttgagtaatcggcccgtctttttagttaacaccagtcaagagtaaggtagggttatgatttcaggcattttagtatcaccgggcatcgcttttggtaaggctctcttgctgaaagaagacgacatcgtcatcaaccggaagaaaatctctgctgatcaagtagagcaggaagtctcgcgttttctggccggccgcgcgaaagcgtccgaacagctggaagcgatcaagaccaaagctggcgaaaccttcggcgaagagaaggaagctatcttcgaaggccacatcatgttgctggaagacgaagagcttgagcaggaaatcatagccctaatcaaagacgatctggcctccgcagacgccgccgcctacaccgtgatcgaaggccaggcgaaagcgctggaagagctggacgacgaatacctgaaagaacgcgccgccgacgtgcgcgacatcggcaagcgcctgctgcagaacatcttgggcatgccgatcgtcgatctgggctccattcaggacgaagtgatcctggtggccaccgatctgaccccgtccgagaccgcgcagctgaacctggacaaagtgctgggcttcatcaccgacctcggcggccgtacctcccacacctccatcatggcgcgctccctggagctgccggcgatcgtcggtaccagcgacgtgaccaagcaggtgaaaaacgacgactacctgattctggacgcggttaacaacaaaatttacgttaacccgaccgctgacgttatcgatcagctgaaagccgcccagaaccaatacatcaccgagaaaaacgatctggccaagctgaaggacctgccggcgattacgctggacggccatcaggttgaagtctgcgccaacatcggcaccgtgcgcgacgtcgcaggtgcagagcgcaacggcgcggaaggcgtcggcctgtatcgtaccgagttcctgttcatggaccgcgactcgctgccgaccgaagacgagcagttccaggcttataaagccgtggcggaagccatgggctcgcaggcggtgatcgtccgcaccatggacatcggcggcgacaaagacctgccgtacatgaacctgccgaaggaagagaacccgttcctcggctggcgcgccatccgcatcgcgatggaccgccgtgaaatcctgcacgcccagctgcgcgccatcctgcgtgcctcggcgttcggcaaactgcgcatcatgttcccgatgatcatctccgtggaagaagtgcgcgatctgaaaggcgaaatcgagacgctgaaggcgcagctgcgcgaagaaggcaaggcgtttgacgagagcatcgaagtgggcgtgatggtggaaacaccggccgcggcggtcattgctcaccacctggcgaaagaagtcgacttctttagtattgggacaaacgatctaacccagtatactctggcggtagatcgcggcaacgagctgatttctcatctctataacccgatgtccccatcagtgcttggcctgatcaaacaggttattgatgcatctcacgcggaaggcaagtggaccggcatgtgcggcgaactggctggtgatgagcgtgctacactgttgttattgggcatggggctggatgagttcagcatgagtgcgatttcaatcccgcgcatcaagaaaattattcgtaacacgaatttcgaagatgtgaaggcgttggcagcgcaggccttggcacagccaacggcacaagacctgatgaattgcgtcaataaattcatcgaagaaaaaacgctctgctaaacttccacgacactggaacgccgcccaatttaatgcttaggagaagatcatgggtttgttcgataaactgaaatctctggtttctgatgacaagaaagacacgggcactatcgagatcgtcgctcccctttctggcgaaatcgtcaatatcgaagatgtgccggacgtagtgttcgctgaaaaaatcgttggcgacggtatcgccatcaaaccggccggcaacaaaatggttgctccggttgacggcaccatcggtaagattttcgaaaccaaccatgcattctctatcgaatccgacagcggcattgagctgttcgtccacttcggcatcgataccgtagaactgaaaggcgaaggcttcaaacgcatcgccgaagaaggccagcgcgtcaagaaaggcgacgtcgttatcgagttcaacctgcctctgctggaagagaaagccaagtcgaccctgacgccggtcgttatctccaacatggacgagatcaaagagctgatcaaactgtccggcagcgtaaccgttggcgaaaccccgatcatccgcatcaagaagtaatcgaagttatcgcgaatgagcagtaaaaaacggcgcccttggcgccgtttttttatcccttcggggtatccccatctcgctgcgtcatgacgaccagcgcggcacgcgcagagtgatgatcagcccctctttgtcgccgttgcgagcctcaacctggccgccgtgcgccagcaccaccttgcgggtaatcgccagccccaggccgtagcccttgcccgacagcgccgatttcacgcgtacgaaaggatcgaagatgctcgacagcttcgactcctcgacgcccggcccctgatcgctgacggcgatctgaaactgattgtcgacgcgcgacagcgccaccgtcacccgctggccgtggctggagaagcgcaacgcattacgcacgacgttatccaccgcacgccgcatcagctccgcattgcccttgacggtgtactccacgtccgattcggcctgcagcacgatatccacgccgggcacctgcgcctcgtagcgcgcatcgctcaccaccgcgtccaccaggccgtacagatcgaaatactcttcgtccggcaggctgctgtgttcggtacgcgacagcgccagcagctcgccgatcattttgtccaaccgccccgactcatgttcgatgcgcttcagcgaggtttcgacgttgccggcattctgccgcgccagaccgatggccaactgcaggcgcgccaacggtgaacgcagttcgtgcgagacatcgtgcaacagctgctcgcgggcgctgaccagcagctccagccgctcggccatggtatcgaaatcgcgcgccacgtcagatagttcgtcatgacgccgccgcatattcgggtacagccgcaccgacagatcgccctgcgccacccgatccaggccgccgcgcagctggcgcatcggccgggtcaggttccaggccagcacggcgctgaacagcaaaccgcccagcccgccgacccacagcatcggcgcaggaatgttgaagaagtgggaacgccgctccggccgatactcttcccgcagcccgcgcacgttataactcagccagtaaccctgcccttctccggtctgcacccaggcggaaatcgctttcggcatccgtcgcccttcaaacaccggttcttccggctcaggcggcggttgggtcatcggggtcaccgacagtagacgccgatcgtcctccggccagtcgcgcatcagggcttccagcgccggcatgccgccactgcgcaactgggtggcggcggaggtcagctgcaggcctatcgcccgccgcgccatggaattctccggcggcacatagcggtcgccataaagagaaaacgccacccacaaggcctgcgtcatgatgagaaaggtcagccaaaagccgagcaaaattttccagaacagtcttccgcgcatgtctggttaccgtatgcgatagccgatgctgcgcaccgtctcgatgctcagcttactgccggccagcgcgctcaacttctggcggatattgctgatatgcacgtccacgctgcgatcataggcctcgcgcgggcgccccagccccttctcggacagttcgtccttcgacaccacgcggtccggcgtgcgcagcaacagctccagcagattgaattccgaagccgtcagatcaaacgccttgccccgccattcgctgctgcgggtagaagggttcagcgtcagctcgccgaagctgatggcggcctcgtcctccgcctcttgcggccgctcttcgaaacggcgcagcaccgcgcgcagacgcgccaccaattcgcgcgggtagcacggtttgggcatgtaatcgtcggcgcccatctccaggccaatcacccgatcgatgttgtcgcctttggcggtcagcatgatgatcggcagccggctctttttacgcacgtcgcgcagcacgtcgatgccgctcatatccggcagcatgatgtcgaggatcatcgcggtatagtcgcccgacagcgcgccctctacccccgccttgccggtcagcaccagcgtggcgtcgaagccttcgcccgtcaggtattcgctcagcatggtgccaagctccaggtcatcgtcgaccagtaaaattttcatgccttgctccttcaccgattttcgttattttcccgccaattccgccggcccgcagccggttttactcaatccttacacatcgctcttggcgtctcgccaccgttagtgtggccgctgtcgcgcgatttctctacttcagtcaggggattggcgcgcgagcaggcgatagccgccgcgtcggcgggccggacaggcagtctgtaacagggaggtgagaaggcgtttcccggcgggacgcgccgccgggaaggaacggtcagtcgaacacgccggtggagaggtaacggtcgccgcgatcgcagacgatcgccaccaccacgctgccgggattagccgccgcgacgcgcagggcgccggccaccgcaccgccggagctgacgccgcagaaaatgccttcacgctgcgccagctggcgcatggtctgctcggcatcgcgctgctcgatatccaacacctgatccaccagctccgggcggaaaatacccggcaggtaagcgggcgcccaacggcgaatgccggggatgctgctgccttccgccggctgcaggccaatgatctgcacctgcggattctggctcttcaggtaaccgcccacgccggtaatggtgccggtggtgcccatgctggaaacgaagtgcgtgatgcgcccttcggtctggcgccagatctccgggccggtggtagtgaagtgggcatagggattgtcgaaattgttaaactgatccagcaccttgccctgcccctggcgctgcatctccagcgccagatcgcgcgccccttccatcccctgctcacggctgaccaggatcagttccgcaccgtaggcgcgcatcgccgcctgccgctccaggctcatgttctccggcatcagcagcttcagcgcataacctttcaatgcagcgatcatcgccagtgcaatgccggtgttgccgctggtagcctcgatcagcacgtcgccgggcttgatctcaccgcgcagctccgcctgctggatcatcgccaacgcggcgcgatccttcaccgatcccgccgggttattgccttccagtttgacccatacctcgctgcccgcctgggcggccagccgttgcagttgtaccagcggggtattcccgatgcattgttcgagcgttgtcacgatctttgcctgtgtgttggtgtgcgtaaagtaaaaaggcaaccccggggttgccttaaagaaaaggactggctaaaacctatcaggcgcttttggctaacgcaacaggttgcagcagttgatcgccggcatacagccgcgcattgaggctgccgacgtaataacggccgccgcgcaccggcgtagcgttgccttccggcagcaccacgccgatcggttcctggtgccagccgatcggctgcaccgtcagctgccagaaatggccgcgcgggctgacttccaacacctgaaccggcagtgggcagcgctcgctgctctcggtcgccacttccatttcccacgggcgcaggaacagatcgacgctgccctggtgcatcggctggaacgacagcggccactggtgcgcgccaacgaacagctgggagccgcgaatttcgccgttcagacggttcacttcccccataaactccagcacgaagcggctggccggctcgcgcataatctcctccggcgagccaacctgttcgatattgccctgactcatcaccacgatgcggtcggccacttccatcgcctcttcctgatcgtgggtgacgaacacgctggtgaatttcagctcttcgtgcagctggcgcagccagcggcgcagctctttgcgcacctgcgcatccagcgcgccgaacggttcgtccagcagcagaatttgcggttccaccgccagggcgcgcgccagcgctacgcgttgtttctggccgccagacagctgcgacgggtagcgattggctaaatggccaagctgtaccatgtccagcaactgagtgactttctgtttgatcgccgcggcattcggccgctcgcggcgcggcagcacggtcaggccgaaggcgatattgtcgaacaccgtcatgtggcggaacagcgcatagtgctgaaatacgaagcccacgcgcctgtcgcgcgcgtgcatgtggctgacgtcgatgccgtggaagcccagcttgccgccgctctggctttccagcccggcgatgatgcgcagcagcgtggtcttgccggagccggacggcccgagcagcgccaccatctcgccggaagcaatatcgagcgagatatcgttcaataccttggtgcgaccgaagtacttgttgatgccgttaatctcaatgctcatgattttcctcccgctcgagacgcgcgttttggcgttccagacgccactgcagcgcgctcttcaaaaatagggtaacgatcgccatcagggtcaacagggcggcggcggtaaaggccccgacggtgttgtaatcctgctgcaacagctcgacctgcagcggcaggctgtaggtctctccgcgaatcgaaccggacaccaccgacaccgcgccgaactcgccgatggcgcgcgcgttggtcagcaccacgccgtacagcagcgcccagcgaatgttgggcagcgtcacgcggcggaacatttgccagccggacgcccctagcaggatggcggcctcatcttcctggctgccctggctgagcatcatcggcaccagctcgcgcaccacgaagggacaggtgacgaaaatggtcaccagcaccatgcccggccaagagaacatgatctggatgttatgcgcatccagccagccgcccagcaggccgttgctgccataaaacagcagataaatcagccccgccaccaccggtgaaacggcgaacgggatatcgatcaacgtcagcagcaactggcggccggggaaggtgaaacgcgtcaccagccacgccagcaacgtgccgaacaccaggttgaacggcacggtgatcagcgcgatcaagaccgtcagccagatggcgtgcagcatgtccggatcgagcaagttgctccacatcgcgccaacccctttggagaaggcctcggcgaaaatcgacatcatcggcaccaccagcagcagcaccgaaaacagcgtaccgatggcgatcaacgtccacttgccccagttgacgcgcgggcgctcggcgccgttgaaggcggaaacatcagccatcagtgccctcctcccaaacgtctgccgaagcggctttgcaagacgttaatgctgaacagcagcagcagcgacgccgccaggatcaccgaggcgatggcgctggccgccgggtaatcgaactcctgcaaacgcacaaaaatcatcagcgaggtcacttccgtcttccaggcgatgttgccggcgatgaaaatcaccgcgccaaactcgcccaggctgcgggtaaaggaaatggcggtgccggccagcagcgccggcgccacctcaggcaacaccacgcggcgaaagctctgccaacgcgtggcgcccagcgtctcggccgcctcttcgtattccggccccagctcttccaaaaccggctgcacggtgcgcaccacaaacggcaggctggtgaacgccatcgccaccgcgatcccaagccaggtgaaggtgaccttaatgtcaaagtgcgccagccactgaccgtaccagcccgtggtggaaaacagaccggccagcgtcaggccggccaccgccgtcggcagcgcgaacggcagatcgatcaggccgtccagcagcgaacggccgggaaaacggtagcgcgtcaggatccaggccatcagcatgccgaacaccgcgttgaacaggctggcgacgccggcggccagcagcgtcactttgtacgccgccaccacctgcgggttggaaatcacttcccagtactgcgccaggctcatctgcgccagctgcatcaccagcgcactgagcggcagcagcaggatcaaacaggtataaaacaggctgctgccgaggctgaggccaaatccgggcagcacccgtttactggacgacaacgccaacatttacttgcgccctgccgctaacagctgatccaactcgccgccggtggcgaagtgagttttcatcacctgcggccaaccgccgaactggtcttccacccggaacagttgggtgtccgggaattgccccttcgccgccgccatcgctttctggtcatagacgcggtagtagaagctggtgatcacctgctgcgccgccgggctgtagaggtagttcagataggctttggccgcctgctcggtgccgttgcgctctacgtttttgtcgacccaggccaccgggaactccgccagaatatcgaccggcggcacgatcacttcgtacttgtcttcaccgtattgcttgcggatgttgttcacttcggactcgaagctgatcagcacgtcgcccaaaccgcgctcgacgaaggtggtggtcgcgccgcgaccgccggtatcgaacaccagcacgtttttcaggaagcgggtcatgaaggcgcgggtcttggccgcatcgttgccgtcagcctggctggcggcgccccaggcggccagataggtgtaacggccgttgccggaggttttcgggttcgggaacaccagcttcacgtcgtcacgcaccaaatcgttccaggtgtggatgcccttcgggttgtccttgcgcaccaaaaacgccatggtggaatagaacggcgagctgttgttcggcaggcgcacctgccagtccgccgggatcagctgcccgcgatcgtgcaggatctgcacgtctgtgacctggttgtaggtcaccacgtcggcccgcaggccctgcaggatcgccagcgcctgcttcgacgagccggcgtgcgattgtttgatggtcagcttgtcgttcggatgctgttgattccactgctgttcaaagccgggattcagcgcgacgaacaattcacgggaaacgtcataagagctgttcagcaattccgccgccgacgcggcgccgctcgccaacagcgcagccgccagccaacctttcagcacgagatttttaacccggttttgtttcattctgcaccttatcactgagtcattccttcaggctttcgccttattgacgaccagtgtatttataactcggtgcggagctgtaacgcttttatataccgtttagtgatttacaagcatcaaacgctataaggcaggaaatgcgaggcgttttgggaagggaaaacagaccgaagccggacgcgccggcttcggcgacggcatcaaagtgacagcaggcgcgtcagcgatggcgcaaagtagtagctgccggtcaccgcacggctgaagcgcaacatcgcgtcacgtttgccgtccagatcgccgaacatgctcagcagctgctgctcgatattgtgcaagcgcgcgcaataggcgatgaagaacaggccgtgcttgccgctggcggtgccgtaaggcaggctctggcgcaaaattttcaggcccttgccgttctctttcagatcgacgcggctgacgtgcgaggtatccgggcgctgatcggccggcagctcttcgctgtcgtgcttggtgcggccgatgatctgctcctgctgttcggtggtaaagcgctgccactggcgcaggttgtgctcgtagcgttgcaccagcacatagctgccgccggcgtcctcttcgccttcggcgatcgtcgccactgccgggcgctggtcgccctgcgggttttcggtgccgtcgatgaagccgctcagatcgcgctcttccacccagcggaagccgtgggtttcttcttcaatcttgatgacattgccgaacgccgccagcgccgcctgcgccagcgtgaagttgacgtcgtggcgcagcgactggatgtggatcagcatatcgcgctgggtggccggcgccagccctttgccgagcggcgtgaacggcttcaactctttcgcaccctggccgctggagagatcgtgccaaacgtcgtaaccgaaagcgatcaccgcgccgaggcacgcatcggggaactgctgctgcagctcgctcagggtctgacaaaactgcttgcagccctggcgcaagtcggcgaattcgccctgtacgctggcttccataaaaatggcgaaacggcagtgctccagcagaatgccgctctgaacctgtgtcatgttgttatcctcaataccaaaaccaggcaacaggtatggcggttgacgcgcgggttccctgttacaaacgcgcgctatcataccgcaagcgcggacgattgccttgcagcagcgcaaagaaaataggggtaatggcttgaaaaggcaggcgccgcgaaccggcgcccgttgaacacgttactgctgcggcttggcgtgccagatgattttgctgaccgtccagcttttcagggtgtcgtccggcggaatgatatcctgcgccccggcccacttgccgctgaagatgtaggtaacgtacttgctctgctccgccacgcactccactttaccggcgtcttcgccgctgcccggcttacaggagccgaacgccttgctgtacatatcgccgaacggcgtgccgagcttgttgccccactccgtcgccactttcggatccagcacgtccacgcgctgcaggcgccctttcggttcgccagtgatcaccagtttcacttcgtcgccggacagcgcctggtaataagagacgatctggccgttgttggtcgccatgccgccgcgcaggcggtagttgccgtccagcccgtcattgatggcgctttccgacatcggcgtgccggcgttgagcttgccgacgcccttggcgccgacctccaggctgctgccgaaccagttgaacggcgacaggctggaccaggagaaattggacatgctcgaacagccggtcagtaacagcggaagccctaacaacagggggcgaatattcatctctagctccttagacatcaatggcacggcgcggtagcccgcgcctgccgcattcggcgttttgctgcgtgccagcctctcacaacggcccgcactacgccaacggttgccagcttggagtgcggaaaatgcgaaaagtgccgcacttctcggcaattagtcggtatgctccggcggcgcgaaacaggctttcaggcgcgcattcagcagcagatagctcagcgccagcgcgtcgagcaacaccaacgccagctccagccccggcgcatcgccgtcctggcgccacaggctgaacagcgagccgccgagcgacgccagcagcgagacagcaagcccccagcgccagccgcgccacagccgcggccattggtggcgacggccgctcagcaaaaacgccagcgccgccggcaggccgagcagcatgccgtaccaaaagcgttgggtatccggataaaacagcgccaacaggctttcgccctgctcgcgcgaaacgccggccatcacgaacaacagccaggtgcgcgcctgcaaaatcagcacggcccaaaatcccagcggcagccgcagcgcgccatgctggtcgtaatcgtccggggaaaaccggggggagaatggcttcaacgctcgttccttgccacagaataaagactatggctacagatgggcgccgccagcgagaatttcaatgcgtcggcttaagaagctcttaagatcggcgtgttttaatccttatcaccaagcaagcacccgatatcagcgggatgtgattttcgataacgataaggaagcgcaacatgaaaaaactgactctggccgctctgatcgcgctgtgcagcgcaccggtactggcgcaacaaggcgggttcctcgatccggccgcgccgcaggcacaaacgcaagccgctccgcagggcggtttctccggccccagcgcggcgctgaccaccgtggacaaggtgaaatcgctgagcgacgacacctgggtgatgctgcagggcaacatcgagcagcgcatcggcgacgatacctacaccttccgcgacgccaccggcaccctgacggtcgagctcgatcgcaagcgctggaacggccaaaccgtcacaccgaaagacaaggtgcagttggaagggaaagtggataaagactggagcagcgtggaagtggacgtaaaaaccgtcaaaaagctgccgtaatgcgctgcggcgggcgggctataccgccgtccgccgctcgatcaatattcctgatcttcgatcagccgtttgcccaggctggtgatgccctggatttcgtagccgagcttctcgtacatctcaaccaccgtgtcgttgtcttcgcgcaccatgatctggatcttcgggcagccgcgggcgatcagcttcttctccagacggttgatcaacgcattggcgatgccgcgcccgcgatagtcgggatgcaccccgaggtaatacgccgagccgcggtgcccatcatagccgcccatcaccgaaccgaccacttcgccgccgacttccgccaccaggaacagctccgggtcgtggttcagcttgcgctcgatgtccatttccggatcgttccaggggcgcagcagatcgcagcgctcccacagggtaatgacttcttcaaagtcgtcttgtcgaaatacgcgaatttccatcgatgttggccgctgttaattaaggtgtttatctgattatcgcgtgattattcacttacgcaatatcaaactgcgatttagcgcgctatttgcccaggaatcgccggtaacaagcgtaataaatggaaatagttatcgggtcgattaatgattatcaatacgatataacgtcgcaaaatagaaacgtcgacggagcgttgcgtcatgaaaaagcagggtaaacccttcctcaattttaaaccgcttaccgtttccccgacgcgacgccaacttttgctttccggcctggcggtggcgctgttcggcgtgaaaagccaaaacgccaaggcggaaggcctgctgcgcaatcagcacagcaaaccggcggcgaaactggccggcggcaaaaagcgggtgatgatcgatcccggccacggcggcatcgactccggcgcggtcggccacgaaggttcgcaggaaaaacacatcgtgctggaaatcgccaaccacgtgcgccgtttcctgcatgagcacgatcacatcgaggcgcgcctgacgcgcgaagaagacgaattcattccgctgttccagcgggtggagatcgcccaccagcaccaggccgatctgttcatttcgattcacgccgacggtttcaccagcccgtcggcctccggcgcttcggtattcgccctctccaaccgtggtgccagcagcgccatggcgcgctacctgtccaaccgtgaaaacgccgcggacgacgtggcgggcggcaagtacaaggatcaggacaactacctgcagcaggtgctgttcgatctggtgcaaaccgacaccatcaacaacagcctgacgctcggccgccacgtgctcggccaaattcgcccggtgcatcatctgcacagcgacagcaccgaacaggcggcgttcgcggtgctgaaatccccgtccatcccctcggtgctggtggaaacctcgttcatcaccaacccgaacgaagagcggctgctgggcaccaccgcgtttcgcgagaaaatcgcccgcgccatcgcggacggcatcatcaacttcttcgactatttcgacgcacaccaacgcaaaccccgctgatgccgcgggcggcgaataagagtatactcagcgccttgttcagccagacgctataaagaccccgcatgagtttacctaacatcgctgaagtaaaatccttcctgctggcgctgcaggatcacatctgcgcgcagctcgcccaggccgacggcggcgccgtgttcaccgaagaccaatggacgcgtgaagaaggcggcggcggccgcagccgcgtgctgaccaacggcgcggtgttcgaacaggcgggggtcaacttctcgcacgtctccggcgccaccctgccggcctcggcgaccgcgcaccgtccggaactggccgggcgcagcttccaggcgatgggcgtctcgttggttatccacccgctcagcccctatgtacccaccagccacgccaacgtgcgcttcttcatcgccgaaaaaccgggcgaggcgccggtgtggtggttcggcggcggttttgacctgacgccgttctacggtttcgcagaggatgccgtgcactggcaccgcaccgcggccgagctgtgcgcgccgtttggcgacgaggtttacccgaaatacaagcaatggtgcgacgattacttcttcatcaagcaccgcaacgaagcgcgcggcatcggcggcctgttctacgacgatctgaacacccctgatttcgaccattgtttcgccttcacccgcgcggtgggccagggcttcctcgacgcctatctgccgatcgtcgaaaaacgcaaggccttgacctggggcgagcgcgagcgccagttccagctgtatcgccgcggccgctatgtggaattcaacctggtgtgggatcgcggcacgctgttcgggctgcaaaccggcgggcgcaccgagtccatcctgatgtcgatgccgccgttggtgcgttgggaatataactaccagccggaggccgacagcccggaagcggcgctgacgcgcgatttcctgccggtgcgcgactggctgcaggagccgaaatgatgcagatttgggtcgatgcggacgcctgtccgaacgtgatcaaagaggtgctgttccgcgccgccgatcgcaccgccatcaccgtcacgctggtggcgaaccagccattgcgcacgccgccgtcgaagtacatccgttcgctgcaggtggcggccggtttcgacgtggccgataacgagatcgtgcgccgctgcgaagcgggcgatctggtgatcaccgccgacatcccgctggcggcggaggtgatagagaaaggggcggtggcgctgaacccgcgcggcgagcgctatacgccggacaccatccgcgagcgcctcaacatgcgcgattttatggataccctgcgcgccagcggcattcagaccggcggcccgaacgccctgaaccagcgcgaccgccagcagttcgccaacgagctggacaaatggctgctgcaggcgaaacgggcgcagtgactgcgccctgctctgctgcggtttagaagcgaacctccccgccgaagatataagtccgcccacgggcggtgttggcggccgtcgcgtcatccccttggatcggcaacatattcagtttgttcaacgcctcggaatagctcttgttcatcacgttttgcacgctaaatttcagcatgacgttgcggttgatctgataagtgctgtacaggtcaataatggtaggaatgttcggcatctcttgcttcaggatttcaccggtcacttcgctctgttcataatccggcgacaagcgacgcgttttgcccgtgtatttcacgatgctgccgacggttagcgattcatcaaggaaacgcaccccggtatccaacgtaaaatacatgtccggtagttcattgatatccccggcgccgaaataggtgctggcgatggaggtcggctgctcggtgtgttgcttgctgaaagagacgcgggcgaatgctcgaccggcgtcatagttggcttcaacctcaacaccatgcatgcgtaccggcgtcagagagttgacgtagatatacatgttgtccgagtaatcttcgctcgcatcggcccaatcgttttccagattttcgcgataactgcatttccgcccattgcggcataccatgtaggactcgctgaagatgtaattacgtaccttactggtatagcccacgaccttaaggcgcaatgaatcttccttcaccaacagatcgtgtccgttggcattgaagccggcctgccaggtttccgcccgttcccccttgaggaacgggttcatcgatgcgccacccgagttggaatagaacacttcttgaatgttcggcgcacgcatcgatttgctgtagctgacgaatggctgcaaccacggcgtcacctgcgccgatagcattaccgaaggattgaacccttgctctttcaaattgatgttcgcggccccttgcgggaagcattccacgcgataatcgcattcaggcttgtagccggtcagcttgttgctggtgtagttcagattgagatcgagttgataaatatcccggttaagctgcaggccggtatataaactgccgattcgctgctcgccggatggcgcgaaggtgttattttctatcgcctcctgcgccgtctgcgcattctctatcgccgattcaacatgtttgcggtattggttgcgcatcagcttgccgccataactgaaggctacatcagtatccagcaggctgaatcggctggtgttgttgatatccagcgcatcggagcggttttttgcattggtgttaaagaaggtgaatagcgaaccgccgtcgtatttctgattgcctttactggtgctgacggtgaagtttaaatccaccagctccgaaaacggcgcatagtgatatttgaggtagaggtcatgactatcgatatcgcgccgagaaaagcggttttggtagttcctggcggaaaactcaatgctattgaactcgttaggcttgatatccagtttgaacagctgtgacttgggattttgcttcataaattcatcgtacccaaaatcttcgctgctgataccgtcgccattgttgaagttcgaataaatagagctcccactgaccgcggccatcgcgccaatgctgccggtatcggtaaacgcctgtcccttaccggcgacggcgatcatgccgctgcggccaatgccgttgctgccgaccgagaatttggttctcacgccgaaaggattgccggaaaagatcacatcatcaacaccgatagtgcggaagttggcgctgcccgccaacgcgtttacgccgctgccgccgctgttctcaccgcgcgccacgtccacgccgacgatgaaattggggtcaatcaaaacgcccgcctggttattggtcgaaccgtgcgatatcacgccagacgtggaagtaccgtaatagttttgggtaatgccatcgaccatggtgttgacccgaccaaagccgctcaggccgcgaatattgacgctgaccgccccctgactggggtcgatctgggtataggtgcccggcatgctgcgcagaatgctgtctaccgactccagatttttgttttcgtcgcgcgagctgaatgcgccaggcttcgccaacgcctctttttcgctgctcttgccgccgtcggcggccgagacgttaagcgggctgaacgccacgctgcctttattgttttccgcctgttcctgcgcggccgcagccggcccgtacagcgccagtcccgcgccgatcaggctcgctatcattttgattttcatatatccccagaaatagccaataaggtttgatggccgacaatgcccagcaaaaagcccgccgaaacgcgcggtaaaagattgttattgttttattgcgccgcagcgtgccgcggcgctgaaggttatttctgcgtctgccgatccgccgccaaaataaaggcgtactccagcgcgccgttttccagccgcgccaggcggcccgatttgccgccgtggccggcggtcatgtcggtggagagcagcaacagcgaatcgccctgtttgaaacgccgcagcttcgccacccatttggccggctcccaatactgcacctgcgagtcgtacaaaccgctggtgaccagcaggttcggataatgctgcttgcgcacgttgtcgtacgggctgtaggacttcatcagcgcataggcggccggctggtgcgggttgccccactcctcgtattccccggtggtcagcggaatgctgtcatccagcatggtggtcaccacgtcgacgaacggcacctgcgccaccaccgcgttgtacagctgcggcgcctgattgatcaccgcccccatcagcaaaccgccggcgctgccgcccatggcgtagatgcgtcccggttggccgtagccgccgttgatcaacgcctgggtggcgtcgatgaaatcgttgaaactgttcggtttttgcgtcagcttgccctgtttgtaccagctctgccccaactcgccgccgccacgcacgtggatcagcgcatagacgaagccacgatccagcaggctgatacggttggcgctgaacgccggatccatgctcatgccgtaagcgccatagccgtagaccagcagcgggttatgcccgtttttgaacagcgatttgcgatataccagcgagaccggcaccttcacgccgtcgcgcgccgtgatccaaatgcgttcgctgtgatacaggctgggatcgacgcctttcacttcctgttgcttgagcagggtgcgctcgcccttgttcagatcccactcataggtgcgggtcggcgtggtcatcgccgaatagccgtagcgcaaccgatcgctgtccggctccgggttatagcccaaccaggccatgtagctggcgtcgtcgaacgggatggcgcgctcggttttaccgtcccagctgatttgccgcagctgcaccagtccgttggcgcgttcctgcaccaccagccagtcgcggaacaggctgaagctctccacctcgtgctgcgcctgcggcgcaatcagcgtctgccaggggttgcccgccgccgccgtgcggtacaggccgaagttcggatcctgatggttggaacgcagatagaactcgccgcggtagtgatcgagataatactcgcggccattttgccgggcggcgaacagctgcggctcgcgctgcggctggttggcgtcgatcaggcgcacttcggaggtggtgttgccgctgatggtgagtatcaagtagtcacgcgaagaagaacggctgaggctgaggtagaacgccggatcgttctcctggtacaccagcttatcttccgccgtcggcgtaccgtactgatggcgatagacctggtacggcaacagcgtttgcgggtggttgcgcacgtagaacagggtttggctgtcgttggcccacaccatgttgccggaggtgttttccagcgtttccggcgaccaacgctcactgtctatctcgcgcagggagatgcggtattggcggcggccctgcagatcttcggctaccgccaggcggcggttgtccagactgacgtccagcgcccccaggcgataataggcatggcctgccgcgcgctgattggcgtccaacagggtttgccacggcgtgtcgccggtgagcgcctggcgctgataccgcgcgaaatctttaccggcggcgtagctttcctgatagcgatagccgttgagctgatacggcaccgaacgatcgtcaggactcatgcggcccagcatctcctgatacagcgtggcgcgcagcttctggtacggcgccatcatctgctcggtgtagcggttctccgccttcaggtagtccagcaccttcggctcttttcggctgtcgtcgcgcagccagtaataatcgtcggtgcgcgtctcgccgtgggccgtcagcgctttcggcgcccgttccgccaacggcggctgcggttgcgccagcgcggcgccggcgacgcctaaagaaagccagagcgcggccgcgatgcggcgacgcggggtgaataacagcggattcataatccctcacgaagtttgaaaaggcggacggcggcgaggcggcgtctgcgggcattaacggcgggcgttcagctccgccagattgaaatcgatcggcatcgttaccctgacggccccctgctgcagcatctccggcggcggcggcggcaacggctgcgcgcgcgacaccaccgccaccgcttcccgatccagcgacgcggtgccggaacgcgccagcaggatcacgttcgatacccgcccctgcgcgtcgacgctgaaactgacctgcggcatgccgctgcgccggcggttgcgggcatccgggggatattccttgatgcggttcagcttgcctttcaccagactctcccacgacagcttggcctgcgcgctgctgttggcatcgctgttgatcggcgcggcggtttggtgggagagcgtctgcgcctgcggcgcggcggcgctggacgcggcggtgttgcgcgtctctttggcctgttcctgcggtttcggctgcgctttttgcggggggcggtgttcggcgcgcttcttctgcgccgtcacgatcttcgctttatcggcgcgcgccagcttaggcagatccggctgttgctgctgctcagcgggctgcgccgcggcggactccgcctgctgcacgcccagcggcagcggtttgctttccggcgcttcaatctgcgccgcccagctcatcatcaccgccggcggcggcagctcgaccggctcgagcgccgtctgcggccaataaaacagcagcaccaacgccgcgtgcgccgccagggcgagcagcaggccgcgcgcccagcgcggctgcggcagctcaaaggccggaagggaataagactgacttaacataggggcattagcttgcttaattgcgaatgattgcagatcacatttactaatgataatcatttgcaactataattaacaccccttttcactgccttaacgtattcatttcactgatggtgtgatccacaggtagtccgccgtgttcgcatcgacctgtacgcccggctccgccagcatcagcaccgtcggcgccgccgccggttgcagatcccgcacgtgcagcggcacgcccaccgatttggcggcgtgatagccgccggcgatcaacagcgcgggcgtgggcgccgccagcaaacgttccgccatgcgccgatcgcgctgctgctggatcgccaacattgcgtgcagttggtcggcctcaatcttgccgccgtgcgaagtgcggatggtctcttccaacgccttgcgcaccgccggctgcgccgatagctgccccgccgggaactgcggctgctgatagaacgccgtaatctcgctgcgatccaggttggctgaccacagcgggtatggcgcgcgcatcgccgccatcgtcaccccgccatacagttcccacttccagccaggctgccaggcgatcagctccgccacgcggccgtcacgcactgtggggtcgctctgcagccactgcttgactttgtccacctgcgcctgctggttcgggttgatcatctccatcagcacgctgccctgcggccgccgctgcggcagttgctgcaccagccattgctcaacctgatggtggtaaggattgtcatgtttttccccgacgatcacccgcggctgctgcgccaatcgcgtcaacagctgctccggcgtcaggctcgcaccgctgtgcagatcggtgatgctccccaaactcgcgatgtcattggccggtgccttcaccggcgtttggctgcaggcgccgagcgccaaggccgccaataaaatcagatatctcatcatgttgtcccattagcgaaaatggcgacattatagataataattatcatttgcatatagatccgacttaacgatttttttacgcggcgatcgccggtggcgcattgcgttaaaaaggcattacgggtataaccaatagccatttagatatttagacgtctatacggatagattattatgcacgcatcggcgcccgccgcagggcagttcaaacgcagcatgaaggcccggcacctggtgatgttgtcgctgggcggcgtgatcggcaccgggctgtttttcaacaccggttatatcatctccaccaccggggcgctcggcaccctgctggcctacctgatcggcgcgctggtggtgtacctggtgatgctgtgcctgggtgagctgtcggtggcgatgccggaaaccggcgcttttcacgtctatgcctcgcgctatctggggccggccaccggctatgccgtcgcctggctgtattggctcacctggacggtggcgctgggctccagcctgaccgccgccggattctgcatgcagtactggttcccgcagtcgccggtgtggctgtggtgcctgatcttctgcgcggccattttcctgctcaacgtcgtgaccacccgtttttttgccgaaagcgaattctggttttcgctgatcaaagtggtgaccattctggcgttcatcattctgggcggcgccgccatgttcggcctgctgccgatgaaagacggcacgccggcgccgttcctgcataacctgaccgcttccggctggctgccgcacggcacgctgccgatcctgatgaccatggtggcggtgaactttgccttctccggcacggaactgatcggcatcgccgccggtgaaaccgagaacccggagaaagtcgtgccgctggcgatccgcaccacggtgatccgcctgatgctgttctttatcggcacggtcttcgtgctggcggcgttgatcccgatggatcaggcggggatcgtcaaaagcccgttcgtgttggtgtttgaacgcatcggcgtgccttacgccgccgatatcttcaacttcgtgatcctgaccgccatcctgtcggcggccaactccggcctgtacgcttcggggcgcatgctgtggtcgctggcccaccagcgtaccctgccggcctactttgcgcgcgtcaatgcacgcggcattccgatcaacgccctgaccttcagcatgctcggcggcgtgctggcgctgctgaccagcgtgatcgcgccggacacggtgttcgtcgccctgtcggcgatctccggctttgcggtggtggcggtgtggctgagcatctgcgccgcccactatgctttccgccgcgcctatctgcgcagcggccagccgataagcggcctgaaataccgcgcccccggctatccattgacgccgatcctcggctttgcgctgtgcctgctggcctgtatcgggctggcgttcgatccggagcagcgcatcgcgctctactgcgggctgccgttcgtcgccctgtgctacctcacctatttcctgacccggcgcgccgggcaaaaaaccgctttgggagaacaacatgtcggttaacaaccccgtcgcccgcctgctggccgaacagccgacgctgatcctggacggtgcgctggccaccgaactggaagcgcgcggctgcgatctgaccgatccgctgtggtcagccaaggtgctgattgaaaatcccgagcttatctatcaggtgcatctcgattatttcaacgccggcgcccagtgcgccatcaccgccagctatcaggccacgccgcagggcttcttgcgccgcggcctggatcaggagcaatcgctggcgctgatcgccaaaagcgtgcagctggcgcaacgcgcgcgccgcgattatctggccgaacacccgcaggccgcgccgctgctgatcgccggttctgtaggcccgtacggcgcctatctggccgacggctcggaataccgcggcgactatcggctggcgcaggatgacttcattgccttccaccgcccgcgcctcgccgcgctggccgtcgccggcgtcgatctgctggcctgcgaaacgctgccgtcgttcgctgaactgcaggcgctgctgacgctgctgcaggagttcccgacgctcggcgcctggttcgccttcaccctgcgcgacagccaacacctcagcgacggcacgccgctgacggaggtcatgtccgcactgcgcggcaacccgcaggtgctggcgatcggcatcaactgcatcgcgctggacaaggtcgccccggcgctgcgtcagctgagcgcgctggccgacaaaccgctgctggtctacccgaactccggggagcattacgatgcggtgagcaaaacctggcacgcctgcggcggcgaacacggcagcctggccgatcaggcgacggagtggcgcgcgctcggcgcgcaattgatcggcggctgttgccgcaccaccccgcaggatattcgcgccatcgccgcgcgctgcaagaaatgagaaagggggttattcggttagccggcgtaaatgttcagcggcttgttcaacgttgaggcggccttgggctgcttcaaccgtaatttcgaccagttctgcgtcttcccgcagtgcaatgccattaataccgagaaatagcgccatgctttggaaggccgtgcgcttattgccatcaagaaaaatgtgaccgtggctgatggcgatgagatagagcgcggccaaacggtaaacgtcggtgacgttctcatagtggtaagcattgagcacgcggttggcggcagcctcaactttgttgccttcctggcggccgtgaggcacaatttcagcgttgaattccgcaatatcctctgcggtcaaaaagatcatctattagccagcgccttaatcgtatccgcgtgtttagcctgaatgcgcgctttcactttggctttgaccaaaacctcatagtcggccttactgatgatgtaaacctcatcgtgtccgcggcgcgtcacttccaccggctgtttttgcgcttccaaaagcacctcggccaaattgtttctcgccgccgtgtagctaatcgtagtcattttctttacctgtacatgtacatatttgacgattatttgtaccacgtccgctggaaataaaaaagcccccggcgccaacggcgcagggggccagtcactcatcccggccttacagcggttcggtctgggcttccaccaccgccagcgccaccatgttgacgatgcggcgcaccgaggcgatcggcgtcaggatgtgcaccggcttggcgacccccatcagcaccggcccgacggtcaccccttccgagcaggagacgcgcagcaggttgtagctgatgcgcgccgcttccatgttcggcatgatcagcaggttggccgagcctttcagcgggctgtccggcatcagatcgtgacggatgctttccaccagcgcggcgtcgccgtgcatttcaccgtcgatctccagctccggcgccagctcgttcaccagctccagcgttttacgcatcttgcgcgccgccgggcaatcagacgagccgaagctggagtgagacagcagcgccactttcggttcgatgccgaagcggcgcacggtttccgccgccatcagggtgatctccgccagctgttccggcgtcggatcgtcgttgacgtaggtgtcggcgataaaggtgttgccgctcggcagcagcaacgcgttcatcgcgccggcgacgtgcgcgccttcacggaagccgaacacgttcttcaccacgtcgtaatgctcgtggtagctgccgatggtgccgcagatcatcgcatccgcttcgccgcggtgcagcatgatggcggcgatcagcgtcgggttgccgatcaccgcgcggcgcgcctgctcttgcgagacgccgcggcgtttcatgatctggtagtactcgccccagtattcgttgaagcgcggatccgactcgttgttcaccacttcgaaatctttgcccggcgtcagctgcaggcccagctttttcaagcgcatctcgatcacgctcggccggccgaccaggatcgggaaggccagcccctgcgacaccagctcttgcgtggcgtgcagcacgcgctcttcctcgccttccgccagcaccacccgcttcatctctttgcgcgcctgcgagaagatcggtttcatgaacaggttggttttgtagacgaactccgccagcttctccacgtaggcgtcgaagtcttcgatcgggcgcgtcgccacgccggaatccatcgccgccttggccaccgccggcgcgatcttgacgatcagacgcggatcgaacggtttcggaatgatgtattccggcccgaaggagagatcctgatcgtcatacgcggaagccaccacgtcgctctgctccgccagcgccagatcggcgatggcgtgcacgcaggccagcttcatctcttcgttgatggtggtggcgcccacgtccaacgcgccgcggaaaatgaacgggaagcacaggacgttgttcacctggttcgggtagtcggaacggccggtacagatgatggcgtccgggcgcaccgctttggccagcggcggcagaatttccggttccgggttggccagcgccatgatcagcggatcgcgcgccatggttttcaccatatcctgcgtcaggacgcccgggccggagcagccgaggaagatgtcggcgttcgggatggcgtcgcccagcgtgcgctggccgttatcctcgatggcgtaggcggctttggtctgttccatattggcgtcgcggcctttatagatgacgcccttggagtcgcagacggtgatgttctgctgacgcagccccagcgccaccagcaggttcaggcaggcgatggacgccgcgccggcgccggacaccaccagccgcacatcggagatgttcttcttcaccacgcgcaggccgttgagcaccgcggcggtggtaatgatcgccgtgccgtgctggtcgtcgtggaacaccgggatcttcatgcgctcacgcagtttctgctcgatgtagaaacactccggcgccttgatgtcttccaggttgatgccgccgaaggtcggttccagcgcggcgataatgtcgattaacttgtcagggttatgctcatccacttcgatatcaaatacatcgataccggaaaacttcttgaacaaaacgcccttgccttccatcaccggcttaccggccaacgcgccgatattgcccagacccagtaccgccgtgccgttggaaatcaccgccaccagattgccgcgcgcggtgtatttgtaggccgccagcggatcttcggcgatctcgaggcaaggcgcggcgacgcccggcgaataggccagcgccagatcgcgctgggtcgccaacggtttggtaggggaaacctggatcttccctgggacaggaaactgatggaaatcaagggcactctgtttgagctgttcgtccattatggattcctttgttttttgcttttatgttgaggtaaggctttgaggctgcgccctgccgtgggccatggcgcccaattacaatgacagggcacagccttgaagtatagtgagagaaacatcacaaactttgaagcgcgccataaccttggtcgaaagagcgttttaaaagtaaaaaaagaaggcctgcgggacgagcagagaaacgccgccgtcagcgcggcggcagcgtggcgcgccaggcgttgagcgtctccacctggccggcgcaaatgtgtaacgaggtttgtaacgccagggcatagctcaccgcatcgccccaggtctccccctgcagcagcggctgctcacagggcgcgaacaccgactcagggggcaacagcggcacggcctgcggcgccggcggccgggcgcaggagctcaaacacagcgccaggcagaggccgagcggcgcagggatcgtttttaatcgcttcacggtatttcctctgataagcctcgtgttgctggcgcagctgctgttcctgccgctgctgcgccgccatcagcgcgcgattttgcgcgtcctgtgtctgcaaggtggcgataagccccgcctgctgcgccaggcttttttgcagttccgccgcctgttgccgcgcggacgccaactggtacgacaacagcgcgctgtagccgccgaggcagatagccgccagcaacagcagcagcaacccgccctgcatcagtttctgcagccagccgctcatgccggatagtcccgaaacggcagctggaagtgcgggccatccttgagggttttccattcaccgccccattcgacgttgatgccgcattcacgcgccgcgcgccgcaccgccactgcaatctgcgcgtagtaatcccactcccaggagaccacgcccgccggcatcgccaccacgtccaccgcgtgcccggtcaggtggcggctgcgcagcgtttggctgctgccggcgcgcaccatttcccgctggcgcgccatgctgcgcagcccctcgctgacggaaaacggcaccagcgaataacgcagcgccaggcgaataacgcgcaccagatccgggtgcacgccgcgcaggttttcttcgctgcgggcggtaaaacgaatctcttcaatgtcatttaacatttttaaaccccgtctttttgccgatgaattttttaattaaggcgttgatgtaatccgcccccataaaaccaatcaggacgctggccaaattcgcccactttaattccaggcccatcaacgccagcgcatcgcgcaccgtccaggccaataacgcgcacatcgccgcattcaataagcgtcgccgaatgcccacgttgcggtaggcgccatgtaatagcgccatcacgccggccaaaatggcgttcaataccggctgaagatattcacatactcgctggactattaagccaacagcgtcaggctctatgctggacatagctcatctccttttttatttttaattaaatgccaatcacggccggtggaacatcggataatcaaaatctagttaaggatgctattacaaagcaaatgaataaatacaggccctatggtcgaattcattcacgctgaacgttggcacaacacataaacgccaagacaggcggcagtaaataaaaaattcattcttatggtgatttatttcgacttttgtttttacgaaaaataaacattaatggcggtggggaatacttccccatcataaaaacatccactctggagaaataccatgtccacacgcaaagccgttattgggtattattttattccaaccaaccaaatcaataattacaccgagtccgatacctatgtcgtgccattcccggtttccaacattacgccggccaaagccaaacagctgacgcacatcaacttctcgttcctggatatcaacagcaacctggaatgcgcctgggatccggccaccaacgacgccaaggcgcgcgatgtggtcaaccgtttgaccgcgctcaaagcgcataaccccagcctgcgcatcatgttctccatcggcggctggtactactccaacgatctgggcgtgtcgcacgccaactacgtcaacgcggtgaaaaccccggcgtcgcgcgccaagttcgcccaatcctgcgtgcgcatcatgaaggattacggtttcgacggcgtggacatcgactgggagtatccgcaggcggcggaagtggacggcttcatcgccgcgctgcaggagatccgcaccttgctgaatcagcaaaccgtcgccgacggccgccaggcgttgccgtaccagttgaccatcgccggcgccggcggcgccttcttcctgtcgcgctattacagcaagctggcgcagatcgtcgcgccgctcgattacatcaacctgatgacctacgatctggccggcccctgggagaaggtaaccaaccaccaggcggcgctgttcggcgacgcggccgggccgaccttctacaacgcgctgcgcgaagccaatctgggctggagctgggaagagctgacccgcgccttccccagcccgttcagcctgacggtcgacgccgccgtgcagcaacacctgatgatggaaggcgtgccgagcgccaaaatcgtcatgggcgtgcccttctatggccgcgccttcaagggcgtcagcggcagcaacggtgggcaatacagcagccacagcacgccgggcgaagatccgtatccgagcaccgactactggctggtgggctgcgaagagtgcgtgcgcgacaaggatccgcgcatcgcctcctatcgccagttggagcagatgctgcagggcaactacggctatcagcggttgtggaacgacaagactaaaaccccttatctgtatcatgcgcagaacgggctgttcgtcacctatgacgatgccgagagtttcaaatacaaagcgaagtacatcaagcagcagcagctgggcggcgtgatgttctggcatctggggcaagacaaccgcaacggcgatctgctggcctcgctggatcgctatttcaacgccgcagactacgacgacagccagctggatatgggcaccgggctgcgctacaccggcgtcggccccggcaacctgcctatcatgaccgcgccggcctatgtgccgggcaccacttacgcgcagggcgcgctggtgtcctaccagggctacgtctggcagaccaagtggggttacatcacctctgcaccgggttcagacagcgcctggctgaaggtgggccgcgtagcgtaaaccataaaaaaaccccgtagccgaatgctgcggggttttcattgagttaaccgtttgattttcgcgtcccttcgtctctattccttcagttgtggcaccatggatagccgccatcccgcaccacttcgcggcccatcaggctgtagacatcgcttttacgcgtcagccgctcatgccaccagttaaacccggcgcccttgctggccggatgccacgccagccaaatcatttcgtcgcccttttgcatctccaccggcaccgtcaccagttcgccgctggccagttctttttcgatcagcgcaggcggcagaaaagcgtggccgatgccgcgcttgagcagcgccaggttgctttccacatcgcacaccaccagttgacgctgcaagggcagcgtaccgtgattgcgcttgggcagctcatggctgctgtcggcgatcaccaccacgatgtcgttcaaccgctgtttcttgcacaccggctttctctgcgccgcgaacgggtgcgaaggcgatacgcacagcacaaagttgagcttgccgagcatcagggttttggcctgcacgctgtcgggaatttggccgatggcgatgatcagatccgcccggttgtttttcagcgcatcccaggtgccgttcaacgcttcccgctgcaccgagatattggcgttcgggcaatgctgaatatagtcgcggatatcctgcgtcagcgtttccagcgggaagaaggtgtctaccgccaggcggatattattgtccagcttggggatgttgcgcacccggctttccagatcctgcaccgcatttaaaatccaactgccttcctgcaggagaaattccccttcatccgtcagggtaatcatggggccattgcgatgaaaaagtttcacgcaaagtttgctttcaatattggaaacccgataagagatcgccgaaggcgttttatgcagcgcctccgcggccatagagaaagatccggtgctcttgatggtgctgattattttaatcgcgtccagggataatctagtcatacaaattcctctttaaaataaaataagaaaaatgacactaaattcccaaggtggtggcgcacaaaaatcgatcaaatcgaacaagggtactcatagcaacaagcaatatacttcataaatgagagcgctatcttaaatactattcatcactacttgatataaatttcatcatagcgccgtgcttttacactgtgacagttaaataaattcggcctaacgatcaaagattgtcatcataatatttttcgttaatagccggtaaaacattccgatctacggccaaaccagaatggtaaaaataaaacaagccgacagaaatggttatttccaattgcgttattagtctctcattttgtcggtgaaatacgctcaacttacaacataatttcagtcaggagtgacttatgaacaaaacttcccgtaccctgctctctctgggcctgctgagcgcggccatgttcggcgtttcacaacaggcgaatgctcacggttatgtcgaatcgccggccagccgcgcctaccagtgcaaactgcagctcaacacgcagtgcggcagcgtgcagtacgaaccgcagagcgtcgaaggcctgaaaggcttcccgcaggccggcccggctgacggccatatcgccagcgccgacaagtccaccttcttcgaactggatcagcaaacgccgacgcgctggaacaagctcaatctgaaaaccggcccgaactcctttacctggaagctgaccgcccgtcacagcaccaccagctggcgctatttcatcaccaagccgaactgggacgcttcgcagccgctgacccgcgcttcctttgacctgacgccgttctgccagttcaacgacggcggtgccatccctgcagcacaggtcacccaccagtgcaacataccggcagatcgcagcggttcgcacgtgatccttgccgtgtgggacatagccgacaccgctaacgccttctatcaggcgatcgacgtcaacctgagcaaataatcggccaaatgaggagatcgttgagggttcagcctggcgctgaacccttttttgcaggtgccgctattgcgacatgttgaggatagtgcgcacattgagcgcgctggtggcgataatgtcgatggcgccggtgcgcaaagcgcccaaaatcgccaacgccttggtattctcggaagcaatggcgatcacacaagggattttgcgcagctcatcaatgctcagcccgatcactctgtcattcatcaccgtgtcgacatgctggccctgagcattgaaaaaatcatagccggcgatgtcgccgatcacgccctgattaaggctggcgtcgataatctcgtgcggcgtaaaccaccccaatttcaccatatagctgttttcattcatgtcgccaatgccgactaacgccacatcggccttacgcgcacgatccagcgtttccttgatcgtgccgttctgcatgaaggcgtctttcagcgcgcgattttcgacgtaggccggcgcatagagcgtctcgctgctgccgccgaacttcttcgccagacgccggctgatatggtcggcgttgatcgcgtcgcccggacggtgggtgccgccgatgccgcagatgaacttgcagttgcgttccgtcacgctgccgacatgatcggcgatcgccgccacgttgcgtccctggccgaccgccaacaccatatcgtctttcagcgacatcgccagataattggacaccagcgccgccacctgccgacgctgttcctcttcgtcctgatggtcgagcgcgatcaacgcgcggctgatgggaaaacgttccatcatctgctgttccagccgggtgctgaataccgggtgataacgcacgttgatctcgacgatgccttcttccttggcgcgcttgagcaaacgaccgactttgatccgtgagatgccgaactttttagcgatctcttcctgcgtgatctcatcctgataataagcaacggcgatttcggtcagcagttcgttatcctgggacacagtttgtttttccatccgttagacgtttccccacggcaggccggttgatgatggcggagggacgatacacgcccctccgacaaggctgaatgcccgctagtataacgcgttcaggcggcaacggtattcagtcgttgctccacctcgtccgccaatcgggtcaagagcaggcagcaagataccgcgccggcgtccagtacgccgcgcgaacgctcgcccagacggctggcgcggccgattttcgccaccagctcgcgggtggagtcccgcccgcgctctgcggcgattttcatttgttccagcgcagcggcgaagtcgtcaccgcgtcccaccgcctgctcaaatgccgccaccgccggtatcagcgtatccatcagacacttatcgcccacgcccgcgctgctgatgtcctgcagttcgcgcaacccgccgtgcaacatcgccaaaaatgcctgcttgtccagcacgctgcgctcacggacgctctccgccatgcccatgaacaggctgccgtacagcggccccatcgaaccgccgatgccctccatcagcgcatccgataccgcatcgaacgcctgcgccagcgtgagctcgcggccgcgaatggcatcgccgcacatcgcgaatcccttcgacatattaatgccgtggtcaccgtcgccgatggcgccgtcgatttcgctcagatattcgcggttgctgacaatggtttctatcagccccgtaacgatctcactgccgtaccgggttgaaatttgttccgtcatgattcactccacctgggttaagcctaaagattgcgccggcatgtccagcagcgttttcagttcgtcatccagcgtcatcagcgtcagcgtcacgcccatcatttccagcgacgtgaagtaattgccgacgtagcgccgatgcacccgcacgcctttcgccgtcaaccgacgctctatttcggcataatagatatacagctccatcaccggcgtggcgccaagcccggagatcagcagcgccacctcctgcccctgttccagcggcatgtcgttgagcacgaaatcgagcatggtgccggccatcgccgacgccgactggatcggcgatacctcaatgcccggttcgccgtgatggccgatgccgatctccatcttgccgtcttcgatatgaaaattgggtttgccgaccgcgggaatggtgcaggaactgaggccgacgccgatcgaacgacaccggtcgatggccttttgcgccgcgccgatcacgccgtccagatcgtatcccttggccgccgccgccgcgccgaccttccacatcagaatttcgccggccacgccgcgccgtttatcgatctcactggccggcgccgaggcgacgtcatcgttggccaccacggttttcacccgtatgccggccgccgtggccttcttgatcgccatcttgacgttcatgttgtcgccggcgtagttgccgtacaggcaagcgacgcccgcaccgctgtccgccgccttgaacgcgtcgagaaaagcccccgccgtaggcgatgaaaaaatctcgccaatcgcgacggcatccagcatgtttttaccgacatagcccaggaacgccggctcatggccggaaccgccgccggtgacgatgcccactttgccggcgatcggcgccggcggatatttcaacacccgcgcattgtcggtggcggcgtaatagtccgggtgggccagcctgtagccctgaatggcgtcttccactacgtgatcgggatcgttaatgattctgttcatcgcggcctctctgtcgcctgaataagaaattattgaatggtgtaaccgccgtcgaccaccaggttggcgccggtgatcatcgccgccgcgtcaccggccaaaaacagggcgctggcggcgatatcttgcggctcagcaaagcgccgcagcggaattttctgcttcatctgctcagccacctcgcctgaccaggccttacggcccagctccgtcaaaaccacggtgggtgaaatggcgttgacccgcacgttgtgtggcccccactccagcgccaacacctgggtcagaccgattacgcccgccttgctggcgcaataggctaagtgattcggcaatgccaccaccccggcctgcgaggagagattgatgatgctgccgccgcgctggcgaatgaaacggcggcccaccgcctggcaggtgagaaacacgcctttcagattgaccgccagggttgcatcccacgccgtttccggcagctcctcggccggatgcagcgcgacgatgccggcgctgttgaccagcacgtccagccgcccgaaatgcgcctcaatctgcgccaccgcccgctccaccgatgcggcatcggtgacgtcggccacgacgcccaccgccgcctcggcgtccagctgtcgcgccacttccgcaacttgcggcgcccgatcgagcagcgccacgcgcgcgccgttttgcagatagcgttcggcaatagcgagaccgatccccgcagcgccgccggtaatcagcgccaccttgccctgcagcgagagctcgcgcggcgccgtagtttgatgattaatcataaatttccccttaaaactgtgaacttcaccctcggtcaggatattttcgccaaactcgcgccgcgttcttcctgcgccgtcgcgctttctttcggcagcgtgacaaatttcatcagcacaccgctgaacaggtacaaaccggtaaagatccagatcacgccaacggtgccgaggctgccgataaacagccccaccaccgccgggccgacaaaggtgctcaggccggcccccagattgagaatcgacatcgccgcccccttattgtccggcgccagcgacggcatgatggccgacagcggcacgaacgccgccaggcaggcgccgaacaacccggcggcgcaaacggtcaacaggtagttggcgccgaagaattgcggcacgtagtagaacatcagcgtggtcaaggcacagccgacgcagccaaaccacatcaccacattgcgccagccgagcccgtcgctgatcacgccgaaaatcaggttgaaaatgatgttgaccgtccacagcgcggcgtacatctgcaaccaatgcgtgcgggtgaaccccatatccatcatgtacatgggcatgaatacgacgaagccgtaagccgcagaggtattaatggtgcgcacgatgccgcccaggccaatcttcgggttttcaaacgcgatggtgatgcccttcaagacataacccagcgacgctttttcccggttgccgctctgtgccgcgccgtcgtcgcgattgagcatcagcgcaatcaccgcgcccagcacgacgaaaatcagcgcgctccacagcgtgtggatctcgccgagataaggcagcatgatgctggaatacagcacgcccagcacgctgagcccgccgctgtagacgaaccagaaaatccccaccgccgaccccagcctttccggcggcgcctcatacgccacccacaccagaaaaccgtaggcgaacaacggataacccaagccgcgcagcgcataggtcggcaccatgatcgccaggttgttgctcggcaggccgaacgtcaaaaaacacaccgaaccgaacagaaacagcagcaggccggccaacatcacccgccgggcggtaaagatttccgccaacacgccggaaaaccaggcggcgatggcggccgcaaagccataaacgctgaacagcagcgccgattcctgaatgctcagccctttgccaatcaaatacggcgacagccagccctgttccagcccttcgcccatcatgaacaccaacacgccggcatagcccagcagcagtttcggtgacagaccaatgcgatgaatcagtccatgcaacatagaacaccccagcacatgtgattatggaggcgcaggctcgcccgcacccgaggaacgacgcaggtttcagaggtttggattaagcaccactttgattgaaccgataccgcgcttcatcagctcgaaaccttcggcgaactgttccagcggcaacgtatgcgtcaccacgccttcggtcggcagatcgccattggcgatgccttcgatcaccagcggatagcagtaagggccgaggtgcgaaccgagcacgtccagttccttgcggtcgctgatgatgctccagtcgacggtcaccggatccttaaacacggaaaattccacgaaggtgccgagcttgcggatcagcgtcaggccctgttccacggacttctgtgcgccggtcgcctcgatgtagatgtcgcagccgtagccctcggtcatcgctttaaccgcggcgggcacgtcgtcacgggtgggattgagcgtcacatccgcgccgaagcgcttcgccaaggccagacgttcgtcggacagatccagcaccaccagcttcgagggcccggatttcttgatggccccgatcatgcccagccccagggtgccggcgccggccaacaccaccacatcgcccagtttgatattggcgcgttgcaccgcatggaaggagcaagcatagggttcgatcagaatggctttttcgatcggcaggtcggccggcacatgatagttaatcgcctctttggtgaacttcatgtactcggccatgccgccgttaacgtttttctggaaaccgtacaggtcatgcttttcgcacatccaatactgaccgcggttgcagaagcggcattgccagcagggaacgatttgttctgatatcacgcgatcgccgagattgaagccctcgacgccttcaccgtaccccacgacatggccgataaattcatggccggggatcatcggcgccttgatgtacgccggttgtttttcatcgccccagaagctgggcgccccttcgaacgctttaacatcaccggcgcagatgccgcaggcttcgatcttcaccaggatctctttcgggccgatcttcggtaccggcacctgttccaggcggtaatctttcggggcgtacgccacaaccgccttcatgatctcggggataccggccgccattttcgcctctgttatgcaggtctgacacatagcactctcctctggtagggaaacttcttttgatcattaacacaaacaaagaacaaatgaacactaacgctatgcgttcaatttgcccacagtgaacttatcaaagtgtgatatcgctcaaaaacccgtctccactagagtgaacaacgattaaaagcccttttttagtgactaagatcaccttttacagtggcaaactgaaaagccaggcaaaaaacaaaagaacacagattgaacatttgattaaacagggatacggtaatgaacgtggcgccaccgaggatcgccacccttttcgttaccaatcaggagatcgctatgctgcctatcgccatcggcgccgatgatgccgccattgaactgaaagatctgatcgttgcccacctgcaacaacgggacatccccgtcattgactacacgacggatcgcgccgcagaaacggggatctatcccgatatcgcctatcgcgtcgcgcaggcgatacgggaggaaaaacatcagcggggcatcctgctgtgcggcaccggcatcggtatgagcatcgtggccaataaagtgcccggcattcgtgcggcgcaatgtcacgatacctactccgcccagcgggcgcgcaaaagcaatgatgctcagatcatcacgctgggcgcgcgggtcatcggcgccgaactggcgaaaaccatcgtcgatgcctggctggaatcggagtttgaagggggaggatcggcgccgaaagtcgagcggatcggctattacgaaaacgcggccggacggcgttaaaccgcctgccgtctcgatggcggtcgcgcgcaagccgcgctccgcctgggtttattcggcattcattgttattatccatcgcaacaatcagaaaaagcgcattttcattctcgatccgatgatgcagtgtgttccccctatgatgaaaaaggttctcatttccctacattgagcttggtcaaggagcttatcaatgaatcaattagacgcactcaagcagctgaccacggtggtcgccgacagcggcgatatcgaatccatccgccagttcgaaccccaggacgccaccaccaacccttcgctgatcctgaaagccgccgcgctgccgcagtacaaggcgctgatcaccgaagcgttggagtatgcccgccgccagggcggcagcaaggaaacccagctgatcaacgccagcgataagctggcggtcaatatcggcgtcgagatcctcaaaagcgtgccgggccgcatctccaccgaagtggacgcccgcctgtcgttcgaccgcggcatgtgcgtcgccaaagcgcgcaagctgatcgccatgtaccaagaacaaggcatcgacaaatcgcgcatcctgatcaaactggcttccacctgggaaggcatcaaagccgccgaagagctggaaaaagaaggcatcaacaccaacctgacgctgctgttctccttcgcccaggcccgcgcctgcgccgaagccggcgtgtatctgatctcgccgttcgtcggccgcatctatgactggtaccaggccaaacagcctgccgccgactacgacgccgatcaggatccgggcgtgaaatcggtgcgcaccatctatgaatactacaagcgtcatcgttaccagacggtgatcatgggcgccagcttccgcaaggttgagcagatcctggcgctggccggctgcgatcgcctgaccatcgcgccaaacctgctggaacagctgaaaaacagcgagcagccggtcgaacgcaagttgaccccgtctaccgagggcttccaccaaccggctccgctggccgaagcggagttccgctggctgcacaaccaggacgccatggcggtggaaaaactcgccgaaggcattcgcctgttcgccgtcgaccagcagaagctggaagacatgttggccgctcaactgtaatcgcactggagtttcgttatgtcttctcgtaaagagcttgccaacgccatccgcgcactcagcatggacgccgtacaaaaagcaaattccggccacccgggggcccctatgggcatggcggacatcgccgaagtcctgtggcgtgactacctcaaccacaacccgactaacccgcactgggctgaccgcgaccgtttcgtgctctccaacggccacggctccatgttgatttacagcctcctgcacctcaccggctacgacctgccgatgcgcgagctggaaaacttccgtcagctgcattccaaaaccccgggccacccggagtacggctacaccccgggcgttgaaaccaccaccggcccgctgggccagggcatcgcctacgccgtcggcttcgccatcgccgaacgcaccctggcggcgcagttcaaccgccccggccatgacatcgtcgaccaccacacctacgccttcatgggcgacggctgcatgatggaaggcatctcgcacgaagtctgctctctggccggcaccctcaagctcggcaagctgaccgctttctacgatgacaacggcatctccatcgacggccacgtcgacggctggttcaccgacgacaccgccctgcgcttcgaagcctacggttggcacgtggtgcgcaacgtcgacggccacaacccggacgccatcaaggcggcgattgaagaagcccgccaggtgaccgacaagccgtcgctgctgatgtgcaagaccgttatcggctttggttcgccgaacaaggccggcacccatgacgtgcacggcgccgcgctgggcgccgccgaagtggccgccacccgcgaagcgctgggctggaaatacgccgcctttgaaatcccgcaggacatctacgcccagtgggacgccaaagaagccggtcaggccaaggaagcggcctggaacgacaagttcgccgcctacgccagggccttcccggaactggccgccgagttcaagcgccgcatgaacggcgagctgccggccgactggaaagccgacgccaaggcgttcgtggaaaaactgcaggccaacccggccaacatcgccagccgcaaggcgtcgcagaacgcgctggaagcgttcggcaaggtgctgccggagttcctgggcggctccgccgacctggcgccgagcaacctgaccatgtggtccggctcgaaagcgctgaacgttgacccggcgggcaattacattcattacggcgtgcgcgagttcggcatgaccgccatcaccaacggcatcgcgctgcacggcggcttcctgccgtactcggcgaccttcctgatgttcgtggaatacgcccgcaacgcggtgcgcatggcggcgctgatgaagctgcgcaatgtgttcgtctacacccacgactccatcggtctgggcgaagacggcccgacccaccagccggtggagcagctggcgagcctgcgcgtgaccccgaacatgagcacctggcgcccgtgcgaccaggtggaatcggcggtggcgtggcagtagggcatcgagcgtaacgacggcccgaccaccatggtgttctcgcgccagaacctgacacagcagccgcgcaccgcagagcagctggcgaacgtgtaccgcggcggctacgtgctgaaagactgcgcgggcacgccggacgttatcctgattgccaccggctccgaagtgggcatcacggtggaagcggcggacaaactgaccgcggcgggccgcaaggtgcgcgtggtgtcgatgccgtcgaccgacgcgttcgacaagcaggatgcggcgtaccgtgagtcggtgctgccggcggcggtgacggcacgtgtggcggtggaagcgggtatcgcggactactggtacaagtacgtggggctgaacggcgccatcgtgggcatgaccaccttcggtgagtcggcgccggcggagcagctgttcgccgagttcggcttcaccgtggacaacgtggtggccaaggcgcaggcgctgctgaagtaagcggtctggcgcaagccgataaaaaagccggtcatcatgaccggctttttttattccatcacccgatgaatctgcaaatactgcagtagcatgatggttttgccgtctttaatccggccatcggcgatcatcgccaccgcgtcgcgaaacggcagttcgatcacttcgatatcttcatcttcaatgccgccgccggccgcgcgccgctcatcgtcatggtattcggcgataaagaagtgcacgatctcggtcacgccgcccggcgacatgtaggcttcgaagatttttttgacctcgcccacctgaaaaccggtctcttccaccgcttcgcggcgcgcgcactgctccggcgaatcggcgtccagcaggccggcgcaggcctcgagcagcatgccgctttcgttgccgttgacataggtcggcatgcggaactggttggtcaacaccaccgtgcccttggcgcggttgtacagcaaaatggtggcgccgttgccgcgatcgtaaacctcgcgcatctgttgcaccgaaccgccatttttgcgtttcagatcaaacgtgtacttgtgcagcacataccagttgtccgataacagctctttcttcacattctcaattttcgacgacatgaccctttttccttgagttgcaacgtgaaaatcataccgcgattacgctgcgccgcagcagacgatttgcaacaaaaatcacaacgcctctccgggcaaaccaggattaaaaatacatcgtgggcggacgcataatctgacagacgaattgcatccgcaaagacaaatcctcagtggaaaccgagctgcggctgaacatcggcgggcatttcgctattcatttgattacacgacgacaattgttcccgttttgttgacaacttgatacaaatcgcggtgcaatttagttgcaaaagttatagttttgctttcgaatgaaactggcgcagccctcacctaagagaaaaggattccgtgattgcttgttaaacgttccgtgaccggcagcctggccagggcgctgttcggcatcgtgatactgtcggtgctcgccaccgggttggcgttgacgaccgtcgccggcagccagagcgatgccgaggcgatcaacattgccggttcgctgcgcatgcaaagctaccgcctggcctttgatctcgatcgacagagcccggagctggagctgcacctgcagcagtaccgacaatctttgcaggcgccggcgctgcaaaagctggcgcgcttttacgtcccggccgaggtgcgcaaccactatctggcgctgcaacgaacatggcaagcgatggagcggcagatccgtgacgggcaagcggccgcctaccgggcggaggtcgccggctacgtcaaccgtgtcgatcattttgtttccgctctgcagcgttattccgagttgaaactcaccctggtggccgccgtcagcgtgctgggctacgccgccatcatcggtctggtgctgttttgcatccgctttatgcgccgccaggtggtcatgccgctgcagcatctggtcgacgccagccagcgcgtgcaacagcgcgactttcgccacccgcagctggacgtggcgctgccgaacgagctcggcgtgctgtcgcaaaccttcagcgccatgtctgacgagctggcccggctctatcagtcgctggagctgaaagtgcaggaaaaaacccagcgcctgcagcaggccaacgaaacgctggaggtgctgtatcgctgttcacaggcgctgagcgtgcgccagatcgatcagcaggcattcgagaatgtgctgcgcatcgtgcgccaaagcgaacgactgcgctgcatccggttgaacgtggcggacgatcatggccagtggcaactgaacgaaggagagccggcgccggcgcaaacctggagcgcgctgccgatcacccaaggcgataaactgctgggtgaattgcgatggcagcccgaagcgcagccgccgcatcctcacctgatgcagagcctggccaacatgctggggcgtggcgtctacttcaaccgggcgcaaaagcagcaccaatatctgctgttgatggaagaacgtgggaccatcgcccgcgagctgcacgattcgctggcgcagacgctgtcgttcctacgcatccagctgacgctgctccggcgcgccgccgacgatccggcggcgcagacgattatcgacgatttcgatcgcacgctggccgatgcctatcgccagctgagagaattactggccaccttccgcctcaacattcaggaggcggatctgaatgccgcgctggagcaactgctgcagccattaaaggcgctaaccaccgcgcggattcagttacactgtcggctgccctcgcaggcgctcaacgcccagcagcaggtgcacgcgctgcagatcgtgcgcgaggcggtgctcaatgccgtcaagcacgcaggagcgagcgagatcgcggtgtgttgcgaggtcaacgccgcaggcgacaacgtattcagcattaccgacgacggttgcggtatcgccagtctggaagaaccggaagggcattacggcttgaccatcatgagcgaacgcgcggcgcgactgggaggaacgctgcgcatccggcgcagaagccgcggcggcacggcggtctgcctgacattctcgccctgaccttgcggctgttcactctgcgttacggttgccgccgggcagaaggccgcccggagaggtttgcggtgcagaatgccgctatttttgaagagacagtcccactgtgaagcacgcctccgggcgcgtttgagtggctttacttgctacagggagcatatttcatggtgatgaagcaataccgagtcatgatcgttgacgatcatccgttgatgcggcgcggcatcaaacaactgctgggactggatgcgcgatttggcgtggtggcagaggccggcaacggcagcgaggctgttgcgctggcgctgcagcacgcgccggacgtgatcttgttggatctgaacatgaagggcatgtccgggctggatacgctgcaggctctgcgcgacgaaggcgtggacgcacgcatcatcgtgctgacggtctccgacgcgcgcagcgatctgtatgcgctgatcgacgccggcgccgacggttatctgctgaaagacagtgaaccggagcagctgctggaacacatcagcgccgccgccgaggggcaaaacgtgatcagcgacgccatggccgactatttgctggcgcgcagcgagcagcgcgatcccttcaccgccttgaccgaacgcgaactggacgtcttgcaagaggtggcgcgcggcctgtccaacaaacaggtggcggcgcaattgcatatctctgaagaaaccgtgaaggtgcacatccgcaacatactgcgcaagctggacgtgcgttctcgcgtggcggcgacggtgatgtacctggagtacaaaagccactgatcgccccgccccggccaatacgccggggccgcttactcgatggcgctgagcagcgcctgatggtgctgatgcacccaactcttgttgaacggcccccagctttccaactgataaaaaccgtcgttgttgcgcacgccctgctgcacgaactgcagctcgacgcccatgccgggcagcgccttcagcacatcctgcaacgtgcggcgcggccagccggtcagcgccatcaaccgcggcacattgggccgctcactgtggctgatcagccagcataaataaagccgacgggcaaataccgggttaattcccatgccaagctcctgctgtaaggtggatccagtttttatttttcggctccctgcggcgaagacatgcgcaaggcctttgatagtaataaaaatgtcttaatagcgtacaattatcgacaccggggcacccacgccgtttcccgctaccgttatttacactatctcctttttttctccacgctttcctcgactatcccgagtaaagtgcaatagcgccggaatccttccctgccgctgaaatgcatatttccgatgcgttttaaagatagaacaagtcataacgaggttcgcgctgcatggccaatttttttattgatcgcccgattttcgcctgggtgctggcaattattctttgcctgaccggggcattggcgattttttctttaccggtagaacaatacccgaatttggcgccgccgaacgtgcgcatcagcgcaacttatccaggcgcctcggcgcaaacgctggaaaacaccgtcacgcagatcattgagcaaaatatgaccggcctcgacaacatgatgtatatgtcgtcgcagagcaccaataccggccaggcgaccgtcacgctgacgttcgaagccggcaccgatcccaacgaggcgatgcagcaggtgcaaaaccagctgcaggcggcgatcaaacgtttgccgcaggcggtgcagaatcaaggggtcacggtctcgaaatccggcgacactacgctgatgatggtggcgttcgtctccaccgacaacagcatggacaagcaggacatcgccgattacatcgtctccaacctgcaggatccgctcagccgcatcaacggcgtcggcagcatggacgtgtatggctcacaatacgccatgcgcatctggctcgatcccaacaagctcaacagctatcagctcacgacccaggacgtggtcaaggccattcagtcgcagaacgcccaggtggcggtcggccagttgggcggcacgccgtcggtcgataaacaggcgctgaacgccaccatcaacgcccagtcgcagctccagacgccggaacagttccgccagatcaccctgcgggtcaatcaggacggttcgctggtgacgctgggcaacgtcgccaccgttgagttgggcggcgagaactacaactacctcagccgctacaacggcatgcaggccgccggcatgaacatcaagctggcctccggcgccaacgaactgcagaccgaccagttggtgaaggacaagatcgccgagctgtcacaatacttcccgcacgggctggaggccaaagtggcctatgaaaccaccccgttcgtcaaagcttcgatcaaggacgtggtgaaaacgctgctggaggccatcctgctggtgttcctggtgatgtatctgttcctgcagaacttccgcgccacgctgatccccaccatcgccgtgccggtggtgctgatgggcaccttcgccatcctttccgcctgcggcttcagcatcaacaccctcaccatgttcgccatggtgctggcgatcggcctgctggtggacgacgccatcgtggtggtggagaacgtcgagcgcgtgatgagcgaggaaggcttgccgccgcgagaggccacgcgcaaatccatggggcagatccagagcgcgctggtcggcatcgccctggtgctgtcggcggtgttcgtgccgatggcgttcttcggcggcaccaccggcgccatctatcgccagttctccatcaccatcgtctccgccatggtgctgtcggtgctggtggcgatgatcctgaccccggccctgtgcgcgacgctgcttaaaccgatcgccaaagggcaccatcacggcaagcgcggcttcttcggctggttcaaccgcatgttcaaccgcaatgccgatcgctatgagcgcggcgtggggcgcattctgcacgccagcggccgctacatggtgatttatctgctgttgctcggcggcatggcgctgctgttcatcaagctgccgacctcgttcctgccgcaggaagaccgcggcatcttcaccgtacaggtgcagttgccggcgggctcgaccctgcagcaaacctccaaagtggtggaaaaggtcgagcggtacttcctcaccgaagagaaacaggacgttttgtcggtgttcgccatcatcggctccgggcccggcggcaacggccaaaacgtggcgcgcctgttcgtgcggctgaaagactgggatctgcgcacctcgggtgccaacagctcgttcgacatcatcgatcgcgccacgctggcattcaacaagattaacgaagcccgggtgatcgccagcagcccgccggcgatcaccggtctcggcaactcctccggcttcgacatggagttggaagaccacgccgggctcggccacgccaaactgatggcggcgcgcgatcagctgctgcagctggcggcgcaaaacccgctgctgtcgcgcgtgcgccacaacggcctggacgacagcccgcagctgcaaatcgatatcgatcagcgcaaggctcaggcgctgggcgtatcgatcgacgacatcaacaataccctctccaccgcctggggctcgacctacgtcaacgacttcgtcgaccgcgggcgggtgaaaaaagtctacgtgcaggccgcagcgccgttccgcatgctgccggatgacatcaacaaatggtatgtgcgcaacagcgcgggcggcatggtgccgttctcggccttcgccagctcgcactgggagtacggttcgccacggctggagcgctataacggcagttcggcgctggagatcgtcggcgaggcggccaacggcgtcagcaccggcaccgccatggcggaaatggaaaaactggtcagccaactgccgaccggtttcgggctggaatggacggcgatgtcctatcaggaacggctgtccggctcgcaggcaccggcgttgtatgccatctcgctgctggtggtgttcctgtgcctggcggcgctgtacgaaagctggtcgataccgttctcggtgatgctggtggtgccgctgggggtgatcggcgcggtcgccgccacctggctgcgcggcctggagaacgacgtctatttccaggtcggcctgttgaccatcattgggctgtcggcgaaaaacgccattctgatcgtcgagttcgccaatgagctgaaccataaagggcaggatctgatgtcggcgacgctcgacgcgtcccgcatgcgcctgcggccgatcctgatgacctcgctggcgttcatcttcggcgtgctgccgatggctaccagcagcggcgccggttccggcagccagcatgcggtcggcaccggggtgatgggcggcatgatctccgccaccctgctggcgattttcttcgtgccattgttctttgtgctggttcgccgccgtttcccgggtaaagcgcatccggcaggcaatacgccggccaccggggactgatccgcgagatataaaaaaagcagcgtcgggttaccgatgctgctttatttcgaacgaaaatctcgttcccaaggtgtttcagtgactttccaatgactcaaccttgccatctgcttcaacgctgtgtcagttgcccaacatctcatcaatgaagtctttccagtttcctaattcacgatcaaccataatactttacaacctcaattatttgacgaagcggattctacgcctgttttttgaccatgtgaagggaaacgggaacgatgccgggctcggaaaccgggcttagcgcacattttcgtatttatctgatcaatgttcagtgcagctattcccttgtgatatcaatttctccacgatagcgtgtaaaaggtataaaaatacgccaatggagcccagatcatgtccacttctttgtctctcttagagttaaaaacgcagggccgctatcaggaggcgaccgcgctggcgctaaggcaactggcggcagagccggaagcggcaacgctgcactttcagctggcctgcctgtatgacgtacagggcctggagcaacaggccattccctgttacctcgcggcgttggctcgcgatttgccgcccgcccaacgccgcgaggcctggctgggtctcggcagcacctaccgcgccctgggagaatattcggcgtcgctacgggctttcgacgacggcctggccgagttcccgcaggccaacgagctgatgctgtttcgcgccatggcgctgtacaacctgggtgaaaataaacgggccgtgaccgatctgttgctgctgctggcggaaacctcgtcagaccccgacatccgcggttatcaacgcgccattcggcactatgccgccgatctcagtcttatcggttagaggaaaacgatggaaattatcaccgactcgagtcgccgcgccatcgactggcagcggctgtgtgaattgctggaggccgccgggctgggcaagcgcgatccgcacaccttgcggcgcgtttaccaacacagccagttttgctattgggggtttatcggcgacgagttgatcgccactgcacatgccatcagcgatctgacatcggtcgcttacctggcggacgtggcgatcgatccgcgctttcagggacaagggctggggcgcaggttgatggatcgggtgatgcaagatctggcgccgctcggcaagattttcatctattccgtgccggaaaagctcgccttctataaaaagtacggctttcacgatttgaccaccggcatggtgtatgcggacggcgctgcgctgcagcgcctgcaacaagggggctacgtgcgttaaatgtgcatcacaaggttttgctcataaagatacggcgggttcccggcggcaagcaaggcacttcacccatacgctgccagccatgccgttgataaaagtccggcgcctgaaagctgatggtgtacaacacggcggaaaggcaaccgcgccgacggccttcctgttcgaagcggcgcaacagttcgctgcccaaccccgcgccgcgcagcgcttccggcagataaaagagatcgagaaacagcagccctaacgatgagcgtccggtaatccctcccagaacttccccactgtcgggatctcttaccaccaccgccagcggcagacgatcgccgtagccgatatgttgatcgttaaaacggtccaatccctccgcgatacaggacgttatttcctgcgttacccgctcggaaatttcgatatgacattttttcacgccggctctccggatcaatcatccatgttcacactctgattacagcttaaaacatcgcagtttctttgtttagaattatctttgtctcaatttcaacgttaattttttcatgacctcatcgccgactctggtgacgttcaaaataaagccactcatcgtgacaaaaccaagaaaaatcttagttattaattcgttaagcccaaacagccacccttaaatgatcgtcaaaaccgatcattttacatattttgatagtcttaatctatgttaattccttttaattaccgaggtattaatagaagatgtctattctattaaccttaccttgcttaaaaattcggttgaaaaaaaagatttactctttataaatcatgctagtatataaccttcccttcaaagctcgcgcccagataacgctcattcatttgcggcgcaagaaaagttcaacatgcaattatttggattttttctttttttatgttttaagatagccatcctcaccgggaaataaaaagtaaaggattataataaaatggaaattgatattttcagcgagtgtgcttataccaccgtcggcatccgacaactcattaaccaaacctgggcggaaaaacgcgcgccggccggctttagccgcagaagggtctgctttatcgatgtcaccatcgccaactttgaagcgcgttaccgcgatgaatatgccaaccccaatacctacaaaataatcattattaccgactgcctgcatgagatggtgattgtcgacaataagaccattatattatcaaaccttatatcattgatccgcttcagccacctgatcggcgacttatataagcgttacagtcactataccgagccgccgcaactctctcagcgcgaatcgcattttctctcggagtggtcaacgggaaaatcgctggccgacatcagcaatgccatgaatatcagaaataaaaccgccaatcattacaaatcacgaatcatgaaaaaactcggcgccagcaggataaaaccgctgttgcatattacccgcgtacggtgtttgaccgagcgtttaaacataagaatcaataaagagtagttctctctcccccgcgccgcattggcggcagaacgcgttcgccggcgccttttaacagccccgccggcgaagatagccgtttcatcaatttgccaacctctctccgtggcgcccaatcgtctctcgcgcgcatcgttgtctggatctcgccgccgctttactggcattatctctgctatcgccgggcggcgagaaggcctaagaccgcgcccgccgctcagtatcgactcgacgagacaggtagctttacgccatggcaaataaaccgcaacagacaacgctgacgatgtacggcatcaaaaactgcgacaccatcaaaaaagcccgccgctggctggaagatcagggcatagcctatcattttcacgactaccgcgccgacggcctgaccgaacagcaactgcgcggtttcgtcgcgcaactgggttgggagccgctgctcaatacccgcggcaccacctggcgcaagctggatgaagcgcagcgcaacgcctgtgataacgccgacgccgccatcgcgctgatgctggcgcagccggcaatcattaaacgtccgctgctggacgacggcaacggccacgctctgctcggtttcaacgccgacgcttaccaacaatttatcgccgaggttgccgtatgacttgcccggttatcgaactggcccagcagttgatcaaacgcccttccctcagcccgagtgacgaaggctgccagcaactgatgatcgaacgcctgcaggcgatcggcttcaccgtcgaagccatggacttcgaagacacccaaaacttctgggcctggcgcggcgaagggcaaactctggcgtttgccgggcacaccgacgtagtgccgaccggcgatgaaaaacgctgggacaacccgccgtttgaaccggcaatccgcgacggcatgctgtatggccgcggcgcggcggacatgaaaggctcgttggccgcgatggtggtggccgcggaacgctttgtcgccgccaacccgaatcaccggggccgcctggcatttctgatcacttcggatgaagaagccagcgccacccacggcacggttaaagtggtcgaagcgctgatggcgcgcaacgagcggctggattactgcctggtcggcgagccgtccagcaccgaacgcgtcggcgacgtggtgaaaaacggccgtcgcggctccatcaccgccaacctgcatatccacggcgtacaggggcacgtcgcctatccgcatctggcggacaacccggtgcaccgcgccatgccggcgctgaatgaactggtggcgatcgaatgggatcgcggcaacgagttcttcccgccgaccagcatgcagatcgccaacgtgcaggccggcaccggcagcaacaacgtgatcccgggcgatctctacgtgcagttcaacttccggttcagcaccgaactcaccgacgcgatgatcaagcagcgcgtggaagagctgctggaacgccaccagttgaattacagcatcgaatggcggctgtccggtcaaccgttcctcacctcgcgcggcgcgctggttgatgcggtggtcaacgccgtcgagcactattctgaattgacgccgcagctgctgaccaccggcggcacctccgacggccgcttcatcgcgcagatgggcgcgcaggtggtggaactggggccggtcaacgccaccatccacaaggtcaacgaatgtgtcaacgccgcggatctgcagctgctgagccgcatgtatcaacgcatcatggagcaattggtcgcatgatcaccgcagagatgctcaccggccgttcgaccgaacacctggcgccgctgagcggcaaccatcggctgcagccgcaggcggtcaatgccttcctggcgatgcagcaggccgcgcgtgaagccggattcgatctccagcccgccagcaccttccgcgacttcgaccgccagttggcgatttggaatggcaaattctgcggccagcggccagtattagataaggacagtcaaccgatcgacgtcgcgccgctgtccgccgccgaacgctgtgaggcgatcctgcgctggtcagccctgcctggcgccagccgccatcactggggcagcgatttggacgtgtacgatccgtcgctgttgccggaagggcaaaagctgcagttggagccgtgggaatatgaagaaggcggttactttgcgccgctcaaccagtggctgacggcgcatatggccgagttcggtttctatcgcccctttaccgaagacagcggcggcgtggcggtggagccgtggcatctaagctaccggccgctggcgcaagaggctgaacatttgctgaccccggcgttgttgctggcggcctggcaagacaaggaggtcgccggtgtcgaatggctcgaacgccatctgccctcgattttttcgcgtttcatacgcagtgaaggaaaggagtagctatgcaatggttagctgattactggtggattattctgctggttctggtggggatggtcgtcagcggcatcaaggaactgcgccgcgtcgacgtgaaaagctatctggccaacaagccggagataccgccgcaccgcgacaacaacgcccagtgggatgacgaagacgactggccgaaaaagaaatgacatcagggcgctcatcggcgccctgagtttttagcgaaaggcgatcagctcgccgcgcttgccggacaatgcctcgtcccagtagcgctgcggcacgtaataatgcagcctttccagcgcggcgttcatcatgccctgattgatcgcatgcccgacgttctcttccacgtcgagcgtgaaatccacgccgttggcccgtaacgcttccgccgccgcgtgagcgtgttgcaccgcgatcaccgcgtcctcttcaccgtggatcaaatgcaccacgctgtcgccgaaagcctgctcaggcaactgggcgaaacgcccgctgaacgcgaccacgcgcccggccagccgggtttccgcttttaacgcctcaagtgccatgatcgccccctgcgagaaccccaccagagcagtgccggcatagcccacgccgctcagctgctgccaatgacgcaccacggccacaaactgcggcatcacgtctgctatgcgggccgcgcggttctcttcggtcacgtcctgtaccgaaaaccactggcgcccggcgccgttgccaaacgcttcgggaccaccgatgctcaccacctgggcctgaggaaagtctttggcgaagtagctgccgatctcccccatcgccaccgggttgtcgccgacaccgtgaaacagcaagatcagctgcgccgccggggtcgccgggctttggacaacgaaatgctcatgtttcatcgatgactccttaatagtaaccaaacctggtgtggcgacagtcgccgccgcaccgctgacagtgactatacgccgttgagaaatcgggaaaatcgggttttattgagcgagttattcaatttattgcaacgactgcgcccagtcgcgccagtagcggcagtgttgcgcattcaactgttccagcgcctgcgccgtttcgtgccgccagtggcgcagcaaggctttctggccgcttacgcccgcctgctccacgcaggccgccggagattgccgccgttgcagatggccgcgcagcgcgggcagcggcagactgctggccaacagcaaacgctgcaatgcccccaggctggcctccagcggccgatgggcgaaagcgaaaccggccagctcgcgccagtcctcttcaccgagcgacgtgtcgccgtcatcgcccgggatcgccagcacgagttcgatgcgctgccgcagccagggccagtcgcgcgccaggtgcttgtgcgccgcgtgccgcagcgcctccccttgctcgctcaggggcaagatagccatcgcggtataacagccgctgctggcctccggcttgctgccgatacgcaccagctcgaaaccgcaggattgccaaaagcgccacagcggctcggtatagccgaagctgaccgacaggaagtccagcccctgcgcctggcggcgttgccgctcgaccagctgacgcgcgataccctgccgccgcagcgtcggcagcgtcgcgatgcgggtaatgcgccgtgaccgcagcgtcggcgcccaccactggccgccatgcgccgccagcgactgcgccaccaggttgccgcgcggccggcggcggccggcccacacgtcgtgcgccaactcggcgctcaacccgccttcgtccgccagccacacggcaccgaccacctcctgtccggcctgcgccagcccaaaatgcatgccgggcgcgtccatcagccggcgtaagtccagcggcgaggtgcggtaatgcgcgctgctcagcagagcatagaaacgcgccagccgctgcggatcggcgcacagttcacgctgctccgcctggctgtaatcgatcgcctggccatccaccggccaggcgggcagctcgttgaacaacagcgcattgtccgtgacccgttccaacgcatcgccctgcgcccagcgcatcggctgttgcagactcaacgcctgataggacggcagcccggcgcaaaacttcagcagaaaaccgcggccggtgccttcatagccctgcaccgtggtggtcagcaacacgcgcgggaaatagccgatcagctgttgcaacagcggcgcggggatcgccgccgcttcatccaccagcagccagcccacgtcactgacgtccccttcccggcactgcgccagcaaggcatcgggcgcccaaaactgcgcgcgcccctgcgcccattccccggccacctcagtggcggcgcggctcggcccggtgatccagcaagtcagcggcgactgcgccaccagcatgccggccagcgtcgatttgccgcggccgcgggcggcggtcagcacccacacgccggactcggcctgcaacaacgccgtcaagatcgcctgttgttcctcggtcggcccgccatccggcggctgccaaccctcacgcgccggcagcgcggccagcgtcaggggctcatcctgccgccagacagtcacttcgctgtcatcggccaaatgatgctgcagatgatgaatgaaatgcggcgtggtgatcggctgcggacaatcgctccagcgcagactgtcgccgtccggtaactgaggccattgccgccagggcggcgtcaacagcagcagccaactgccggcgcgcaatgcgccgcacagcgccgccaacgcctccacgtccagcgactgaccggcgtcgaacactgcgtgcagccgctcctgccccagcaattggcgcaccgcgcggctcggcaaagccgtcaggccgggcggcgggttttcccccacccacggccagtcgcccggcagcgtcgccgccagccgctgcgcctgttcgcggcaccagtcaggttcaccgctgagcaccagcaggcgccggatgccctgccgccgcatgagttgttgcgctgcctgtaacataaggctgtatctcaatccgaaaaaaatgccggagtcaggctccggcacttgaggcgttaacgggatgcaaaggtattgcaggtattgggatcgccgctgtcgaagccttgtttaaaccaggtgtagcgctgctgcgaggtgccgtgagtgaagctgtccggcacaacgcggccctggctctgctgctgcaaccgatcgtcgccaatcgcctgcgcggcgttcagcgccgcctgcaggtcgccctcttccagcatctgctgcttctcggcgtatttaccccacacgccggcgaagcagtccgcctgcagctccattttcaccgacaggcggttcacttccgcctggctggcgccttgctgcatctggcgcaccttcggctcgatgcccaacaggttctgcacgtggtggccgacttcgtgcgccaccacataggcctgagcgaaatcaccgccggcgcccagtttggtcttcatgtcctgatagaaagacagatcgatatacaccgttctgtcgcccgggcagtagaacggccccatcgccgactgaccggtgccgcagctggtgcgcgtcacgccgcgatacatcaccagcttcggcggttgataggttttgcccatgcgctggaaaatctctttccagttgtcctcggtcgaagccagcaccaccgaggtgaatttggccagctcatcgtctttcggactgatgctggcgctctgttgttgaccctgcggcgcgacgttaccgccgttcaacagcggcgacagatcgatgccgtaataaccggccaccagcaccaccaccagaatgacgatgccgcccttgccgcccaccggcacgcggaaaccgccgccgccgcccaaacctgaagactgcccgcgacgatcctcaacattgtcactttcccgacgcccttgccaacgcataaatacactccagatatttcccctgctcgttgaagttgcgccgcgatcgtaagcgcaaaggcagcttcaagcctgagtgggataggttttagtcatctcgcatccatcattataaatggtctgccgcggaggaaatgtagaaattttctggaaaaacgcagaatagcgggacgatccggccggatcgccccgaatggcggtgccgacgcttagtcgagtttcacgccgatgcggcgcgccacttcttcgtaggcttcgatcaggccgcccaggctttgacggaaacggtctttgtccatcttgtccagggtgtttttgtcccacaggcggctgccgtccggcgagaactcatcgcccagcaccacttcgccgttgaacagaccgaactccagtttgaagtcgaccaggatcaggccggcgtcgtcgaacagctgggtcaacacgtcgttggcgcggtagctcagctcgcgcatgcgcgccagatgctctttgctcacccagccaaaggtttcgcagtaggattcgttcaccatcggatcgtgcatggcgtcgtttttcaggaacagatcgaacagcggcgggttcagcaccaggccttcttcgatgcccagacgcttcaccagcgaaccggcggcgcggttgcggatcacgcactccaccggcaccatgtccagcttcttcaccagcacttcgttgtcggacagcagacgctccatctgggtcgggatgccggcttcttccagtttgctcatgatgaaatggttaaacttgttgttcaccatgcctttgcgatcgaactgctcaatgcgctgaccatccagtgctgacgtatcgttgcggaactccaacaccaacagatcgggattctcggtggtgtaaacggtttttgcctttccgcgatacagctcagctagcttttgcatcttacttactccagtgatgtatccccgttgtctcccgagcgcggcccgaaattagggggtatagaattgacctaatgaattctttggcgtgccggacactattgtgccaaacctgcgacgcaaacgataccgtatagacaaaacaaaaaggggccgaagcccctttttgattagttaacgctggttttgctgaaggctgactggaatgccgccaccagtgcgtcgtttttcgactgggtgagcggtttgcctttcggatcgatgaattgcaggctggtgcggttgttgagatcgccgacctgcagtttgtaatcgccttccgtcagttcaggatccttgacgcccaacgcatcccaatcgctgctgctcagggacttgtaggtcacggcgacggtgccctgcggacggctgcggtcacccactttcatccccagtttttcgagcgccggcggcaggcgatcccacactacggtgtacgggccgcgcaccaccagcatcggcaggccggtgtcatcggcgccgctctgcacgtccagcgcgccgaagcggctggccgtctggctgctcgccaggttatcctgcttgtccaggccttcgatcagggtgttgatcatcatgccgttgtagcgctggatctcagactgatcggtcacctgctcggtcttgccctgctgctgcaggccaacgcttttcaccaccagcgcctgctggtagccctgctgctgcacgctgatctgataacggccttcgtactggttgtcttcgtccagacggttccacttcacccagtcggtggtcagggtctgaccggcgtcctgacgggaagcgatcgcgatgttcttcgcctgcagcaggctgaccacgcgcgaccacaggttctggttctgcgggctgttttccagcagcagcgtgccgctgtcgccggcgtattgcgcgcgtgaaccgctcagcagcgccaacggctgcaccggcggacgaatgtccaactgcttgccgacgttgccttgcaccgttgtggccggcacgtcatagttgccgctctgcaccggcaggatcatgccggacggcgcgttcagcgccttgagcggagccgcgtcgaggtaggcctcgtcgccgctgacctggcgcttgtagcgctgatcgctgctgcaggctgccagcatcatcaccaatgagatgcccactacttttgctaccgtcgacttttgcaatgaataagccatcaaatttcccttagagttacagcaagccgacgcttttcagcgcgcgctccaccaccgggcgggcggcttcgctcaacggcgtcatcggcagacgcagcgtatcggttgccatcaatcccaacgccttacaggcccacttcaccggaattgggtttgcttctacaaatagatcctgatgcaacggcatcaagcgctgatttaagcggcgcgcttcggcaaatttgccctgcgccgccagcgcgcaaagttccgccatctcgcgcgcggccacgttggccgtcacggaaatcacccctttgccgcccagttgcatgaagtccagcccgctggcgtcgtcgccgctcagcaaaatgaaatcttcatcgtcaaccagcacttggatctgactaacgcgacttaagttccccgtcgcttcttttacagcaacaatattcttgattttcgccagccgagcgatggtcggcggcagcatgtcgcagccggtgcgcgaaggcacgttatacaggatctgcggcagttcggtgctctcggcgatcgccttgaagtgctgatacagcccttcctgcgtcggcttattgtagtacggcgttaccgtcaggcagcccaccacgccggtgttggcgaagcgagtggtgagcgcgatggcttcggcggtggcgttggcgccggtgccggcgatcaccggaatgcggccgtcggccaactccagcgtctgcagcaccacgtcaacgtgctcgtcatgggcaagcgttgcggactcgccggtggtccctacggaaacgatcgccgcggtgccactggctacatgataatcgatcaattttttcaggctcgcgcgatcgacagcacctttgtcgtccatcggcgtaaccagtgcaacaatacttcccgtaaacattggccgtcccctccacaaacaagtcactcatggtacttttgctgcctatccaaaagcaagcgcacaaccgcgttgtaagcgcttggcaggcggttttttttatgtttaccatggtaaccccattaagcacgacaggaagcgctattttgcctcagtcagacgaacactatctcgtgattaccgcgctcggcgccgaccgccccggtatcgtcaataccatcacccgccacgtcagcagttgcggatgcaatatcgaagatagccgtctggccatgctgggagaggagttcacgttcatcatgctgctgtccggcagttggaacgccatcaccctgatcgaatccaccctgccgcaaaaaggcgcggagctggatctgctgatcgtgatgaagcgcacaaactcgcacgaaaggccgccgatgccggccacggtgtgggtgcaggtggaagtgaaggactcgccgcacatcatcgaacgctttaccgatttgttcgactccagccagatgaatatcgccgaactggtctcgcgcacgcagccggcggacggcgacctgccgccgcagctgtatatccaaattaccgcccacagctccggcgatcgggacgcctcaaatattgagcaagccttccatcgcctatgtacagaattgaacgcgcaaggcagtattagcgtggtgaactatccacagcatgacgagaaagatggagagtagtgatgagcccattgaaagccggtgacacagcgccgaaatttagtttgcctgaccaggacggtgaggaaattaatttggccgacttccagggacagcgagtattggtctatttctatccgaaggcgatgacgccgggctgcaccgtgcaagcctgcggcctgcgggacaacatggacgaattaaaaaaggtcggcgtcgaagtgctgggcatcagcaccgacaaaccggaaaaactgtcgcgcttcgccgaaaaggagctgctcaacttcacgctgttgtctgatgaagatcatcaggtgtcacaacagtttggcgtgtggggcgagaaaaccttcatgggcaagacctacgacggcattcaccgcatcagcttcctgatcgatgccaacggcaagattgaaaaagtgtttgatgatttcaaaaccaccaatcaccacgacatcgttctgaactacctgcagcagtaattctcacgaagcgcagcggcctgctgcgcttcgtttcttccctgtcagtcggccttgtcttccacctcgacccgcagttcatccggccaggcatggatcaccgccttcaccagcgtcgccagcggtatggcgaaaaacacgccccaaaagccccacatcccgccgaacacgatcaccgacaggataatcaccagcggatgcaggttgaccgcttcggagaacaaaatgggcaccaacaggttgccgtccagcccctgcaccaccaggtaggcgacgatcagcgtccagaaatcggcgccgacgccccactggaacagcgccaccaccaccaccggtatggtgaccagcaccgcgccgatgtaggggatcagcaccgagaaccccaccagcaccgccagcagcagcgagtagcgcatgtccagcacggcgaacaccaggtaagtcgccacgccgacaatcaccatctccagcactttgccgcgaatgtagttggtgatctgctgattcatctcgttccagacttgccccgccaggccgcgattgcgcggcagcacgcggcgcaccgcgttcagcagctgttctttgtccttcagcaggaagaacatcatcatcggcaccaggatcagatagatagccaacgtcagcaggccgaccagcgacgccagcgagaatttcaccaccgattcgcccatgccggacaaccggctgcgcaggttttccgccatcatgtcgatgatgccggcatccaccagcgccggataacgcttcggcagcgtcgcggcgaagttatagaactgattgagcatgcccggcagatcgctcatcagattgatgccttgctgccaggcggtcggcgcgacgacgaacaccagcagcatggcgacgcccgagaacaccagcagcatgatgctcgccgcccaggtgcgcgaacagccgatgcgctgcaggcgcgcggtcggccactcgagcagatacgccagcacgatggcaaccagcaacggggtcagaatgccgtgcaaaaaatagagaataaggaacccggcaaccaggatcaccagcagcgcgatggcctgaggatcggtgaagcggcggcggtaccactgtaataacatctccagcatcagagcgggctccttgagatttggcgggcgggcatggcgattcctgtgatgggcctgattaaagcatagatagaacgggcgcacgcgggatgtgcaaagcactcagagtactcaaagttcgccatacatcaacagcgatctggctgattttatcgcacgggcagacgatcgacgcaaaaatccgcagacgcggcgactggctcgatgagcggccccgaacggggccgcggaagattacagcgaagtagcgacagaaaggggcgaaccgaccgccaatgcgaacaacaacacacagccaatcgcgatcgccgccgccagatcatttttcattgtcccgtcccctgatgcttaaactggttatcgtcacgaactctgtcggttctacgttcacggccttttccgatgcacgtcattaaaaacccccgcctaagcgggggagaaaacgttctggtgcatcaagtgttacaaggaggtcatgagggattgctaaccctaaatgactatttcaagctaggattattcccagaacatggcaagcgatcgcgtcgaggttatccgcactttgggataaacctcataaaaaaatcccgcacggcagcgggatgaagggatgataacgtcatgaattttttatgcggacaatgaggcggtattgtcgtcatttggcgacaataccgcgccggcacggtggtcacaagggaaatttggccacggtgaggaaatcagaatttcgccaatgcccgcgatcgcgcgcccgtcagcatcaacgaaaaaatgggattttcgtcagacagccaccgggaaaaaaccggtagcatggccgatataatcccaaatgccgtagggggaaaaatgaacagcaaaccgtgtgaatttgatgaagccatctgtctggcgatcgggcgtggcgtttgcgaagtcgtcaagataggagatgaaatcagcatcttctccctgctggaagccatcgagagcttcatcgaacggcaggcgctcagcgaaagcgaaatcgcggcggcggacgacgcgctggatttgatcaccggtttggttcgccgccagtgctgacgcctgttacgaggcgcggccgatgagccgttgctctaccgtgacgccgggcatcatttgccgtaaaccggcaatcaattcgtcgcccgcctcgtgcagcgccgccaacggcatcgccggcaggctctccaggatgaaccacatccgctcggcctcggcgctcaaccgggttctgaccccctggcgccaattccagcatcgccatcctgtgcaagctcgcggcggcgctgggcctgtcggtggcggacatcgtcaacgtcacccgcgcgcccgccgtctacctgattgaaagccaagatattcccacgctgtggcatggcgatcgcggcggctcggcacgtttgctcgcgggcacccaaggcccgaacatgatagaactgtggcggtgggaaatggcgccgggggaagcctatacatcgggcggccacccgacgggcaccttcgagctgctgcacgttgagcgaggcgtcttgagccttgccgtcgaacagaccgagctcatgattgcgccgggctgttcggcggtcgccaaaacggacggcccacatcggtacgccaacgaaggcgaagacacgctgattttcaccatgacggtcgccgaactgcacgcctgaacggcgaccctgacctgaacgcttgcacaggagaagagccatcatgacaacccctgccccactggagtggcagcgtgcggactatctcgtcagcaccgatcccgccctgctggatctcgatgccatccacgcttttctgacccgttcgtcatgggcggaaggaatcgatagagaaaccgttcgccagtccctcgcccacagcttgtgtttcggtttgtatcacggcgccaggcagatcggtttcgcccggctgatcaccgattacgccactttcggctatctgtgcgacgtgtacgtgctggaaacattccaaaaaagcgggctgggcctgtggctggcggaatgttgccaggcccatccgctgatggcgacgctgaggcgagtcatgctggtcaccagcaccgccccctggctctatgagaaagtgggctattcggccatcaaccgccccgactttgtctggcagatcgcccggccggacatctaccgacggtaatgttatttcagcgcctgctcggccagcagcccgagggcgatgacgatcatcgccgcgccggagatgcgccccaccacctttgcggcctgaggacgcgtgcgcagcaccgactgcgaaccaaaccccaccagcagatacaccaggccgcagctgatcaaatgcacgacgcccaacgccagcatctgcatcggcaccgaccattcggctcgggcgtcggtaaattgtggcagcagcgccagaaacagcagaaacaccttggggttcagcccgctgacgcacacgcctttgccggcccagcgcagccaggaatcggaacgctgatcttcaccggcgccgggcaccggcgggtgcaacagcatgttgaaaccgatccacaagaggtaagccgcccccaacagggtgagcgccgtcagcgccagcgggttgccgaccagcagcgcgccgacgcccgccaccacgatcgcaatcatcaacaaatggccaaacagcaaaccggcgacggcgggcactaccacccggccgcgaatacccgccgagatcacataggcccaatccatacccggcgtgatcaccaacaaaatcgacaccgcccaaaacgcggcgaacagagcgagcgtcatgccggcgccctctcaaacgcaccgcgccacaccgaacagagaaccattgcgctttcctcgtggaagaagaacggcctccgcctgccgcgggggccgtcaaaaccgttcaacagatggcaagaatatcctcatgacgttaaaatgtgctttcaattacttgccttaaatcggcataaacggggaaatttttccaaatggataagattgatcgcaagattcttgctgaattgcagaccgacggccggttgtcggtgaccgagctggccgagcggatcggtttgagcgtgtctccctgtcaccgccgggtgcgggcattagaggagtctggggtgatcaggggttaccgcgcccaactcgatcccagcagcctgggctataacttttccgctctggtgttcgtcaccatgcgcgaaggcgatcgccgcgccgttgaaaccttcgaaaacgccatggtggacattccccaggtggtgcaagcacagcggttgtttggcgatcccgactatctgctgcacgttatagcccgcgatctgcccgccttccagcaactttacgacgagaagctctccgccctgccgggcgtgcagcgcctgagctccacgctggtgatgaaaaccgtggtgccggaacgctcgttcctgccgttgggaaaatgaggacgggaacgttgccgctcccgttttgacgaccttaaggcacaatcacgaaatccggattggcgatggcgaacagcgcctcgcgatccgccgccggcggataaatccactgcgtgttgatctcctgcttaatctttttgccttcctggcgggtaaaacgcacctggcgctgccagccttcggtatagagcgcgccccagggccccaaatccaggcaggtcacatacttcggctggctgtacggatgcgtcggcaaccccgccagctccgccgccgcattgtggccggccacgcggccaaggctcatcgcatgctggcaggtcatcaggttgtgattaccgagatcgtcggtcgccgccttcaccgtatcgccggtcacgaaaatgcccgccgccgccggcgcgcgcaggaaggcatcgccgatcacccggccgctgccgtcgcgctcgccagggatctgctcggtcagcggatgcgcccgcacgcccgccgccaggatcaccgtgttggcagcgatacgctcaccgttcgacagcatcaccccctcggcgtcgatggccgagacgcgcaggccggcccgcgcttccacgccgcactccgccaacgcctggcgtatcaccgcccccggctctgcccccatccccgcgcctacttccggcgcggtatcgacgatcaccacgcgcacgttctcgtctttgcccagcgcatcccgcagccgctgcggcatctccgccgcgctctccagcccggtcagccccgcgcccactaccacggcagtgttgcgcgcaggcgtcgaaggtttggccgccagcgcattgatatgggcgcccaaacgctgagcgctttccagcgtatcgacgttgaaaccgtattcggcaaagcccggcaccgcaggcacggacagccggctgccggtggcccacaccaaacgatcgtaggccaactcaaggggttcccccgccgtcggcgccaccgtgagcgttttagcagcggcatcgatacgctcaacaaccccggccaggtgtcgcacgccaacggcggcgagctgcgcggaaatgtccgggttcatgttttccaacaccgcttcatacaggcgcgggcggatggtgaccgttggggtcggcgagaccatgagcacctcgatatcgtcatgcttaccggcgagggtaatggcgcgcatggcggacacggcggcccaaaaaccggcaaaaccggaaccggcaatcactattttctgcgtcatgggatgactccttcatacagggttaaccgggcgataaggcttgcccgcagttttttcggatgaacgatgccgttccgctcccgtaacagggtgcagaaggcccgcccgccccttccgaagaggcgggaaaaagtgtgtttcgcttttttaaggaaaggcggagcttaggttttggcgcgcgccgttttgccgctgcgcgcggtgcgttccgtcatgcgttcgtcgagccagaggttgacctcaccgaagaagccttgcggcgctttgcggccaaagcgggccgcgacgtcgccgagggtctgcgccgccagtgcgtcgcgcatcgccttctccgcctgcagcatcaccgcatggatagcgcatttgccggagaccgcccaatccggcggggaatcatcgaacaccgcacagcgcccgcgcacctcctggcaatcgaacagcggcttgtgcccctcgatggcgtcgataatttccagaaaactgatctcgtccgccggacgggccagccggtaaccgccgcgcaccccttcgctggcggcgacgatccccgccttttccagcttgggaaaaatcttggccagaaagctgggggagatgccctgcagctcggcgagttcgcggctgctgagcgcgcgctggttatcgccgaccagccacagcagacagtggatgccatattcaacgctggttgtgatgtacgccatatgtccgttttcgaccgtcagtgaatcttcaataacgcagactatatgagtctgcgtttatcctgtcaataaaacacggatcaactttgtccgcgttcaattcaaaatgcatgtcgccagcgacgaaaaagcgcccttcaaaatgaaaaataaaacttttttgctcgattcgcgctcggctaacgtttccttgtcgcctgcggctgactatgatgtgatgggtgccgccgccgcggtttgtgagccgccgcactttcgcgcggattgcgccgcgggaataaagaactcttgtctgctgctgacgtcttagaaatgattatttaagggaaacgcctgactatgaccaaccggttgaccaaaaccgcgttagcggtgctgctgctcagcacgctgaacgccaccgccctggcgccagcacaggcggaaagccaggaccagttgccggatatgggcacctccgccggcggcaccctgagcatcggacaagagctggcgatgggcgatttctatgtgcgccaactgcgcgccagcgccccgctgatcaacgatccgctgctgagccagtacatcaatcagctgggcaaccggctggtggccagcgcctattcggtgcgcacgccgttccatttctatctggtgcgcaacgacgaaatcaacgccttcgccttcttcggcggcaacgtggtgctgcattccgccctgttccgcgtcagcgacaacgaaagccagctggcctcggtgctggcgcacgaaatctcgcacgtcacccagcgccacctggcgcgcgccatggaagatcagcagcgcaacgccccgctgacctgggtgggcgcactcggttccattctgctggcgatggccaacccgaccatgggcatggcggcgctgagcggcaccatggccggcacccagcaaggcatgatcagctttacccaatcgaacgaacaggaagccgaccgcatcggcattcaggtgctgcagcgcgccggtttcgatccggaagccatgcccgacttcctgcagaaactctcggatcagtcgcgctacgcctccaagccgccggaaatgctgctgacgcacccgttgccggacagccgcctctccgacgcgcgcaaccgcgccaaccagatgccgaaacacatcgtgcagtcttcgcaggactacctgatggccaaggtgcgcgccctgggcatgtacagctcggaaggctacggcctgaacgaagagctgctcggctcactcagcaagggcaacgtgcgcgaacaggcggccgccaaatacggccgcgccattctgttctatgaagcgaaaaaatacgacgacgcgcgcaacatcattcagccgatgctggcgcaggatgcgaaaaacgtctggctgatcgacctgatgaccgacatcgatctcggtcagaaacgcgcgccgcaggccatcgcccgcctgcaggcggccaacgccgcccagaacaacaacccggtgctgcagctcaatctggccaacgcctatgtcgaaggcaaccagccggcgcaggcgtcgaagatcctgaaccgctacacctttgcccatccggacgatccgaacggctgggatctgctggcgcaggccagcgccgctcaggggctgcgcgatgaagagctgtcggcccgcgccgaaagcctggcgctgaccggccggctcgatcaggccatcggcctgctcagcaatgccagctcgctgcagaaactcggcagcctgaaacaggcgcgctacgatgcgcgcatcgaccagctgcgccaactgcaacagcgcttccgccaataccagcgcagctgattcaacaaggaatgaacgccatgaaaaacgtcacgatttaccataacccgcgctgctccaagagccgtgaaaccctggcgctgctggagcagcacggtgtcgatcccaaggtagtgctgtacctcgatacgccccctacggtcgatgagctgaaaaaactattgaaagaactgggcttcacatcggcgcgcgatctgatgcgcaaaaaagaagatctgtacaaggaattgaagctggcggacgacagtctgagcgaagagcaactgctggcggcgatgacggcgaacccgaaactgatcgaacgaccgatcgtggtgaaaggcagcaaggcgcgcatcggccggccaccggagcaggtgctggagattttgtaaattcgaattcgggcgcggactattgcgccctttcttttacggtagcggctacagccccaggatctctttaacgaacggaatggtcagcttgcgttgggcagtgatcgaggcgcgatcgagctgatcgagggtcataaacagcgtgcgcatctcgcgatccagccgcttcagcaggaagcggcccacgtcttccggcagttcgaagccgcgcagtttgccgcgcagctgcagcgccagcagcttctcttcgtccgacagcggctgcagcttgtagatctgcccccagtccagacgcgaagccagatccggtaaacgcaggttcagctgacgcggcgggcgatccccggtgatgaacaaacgggtgcggccggtttccaggatgcggttgtaaaggttgaagatcgccatctcccactcttcgtcgccggcgatgcattcgatattgtcgatgcagaccagcgccagctgttccatgccgtccaatacttcaggcacgaagtaagcgcgcttgtcgagcggcacatagcccaccgcttcccccttctgcgaaagctcggcgcaggccgcatgcagcaaatggctgcgcccgccgccttcacgcgaccagaaatagatatagctgccatgttcctgacgaacggcggattggatcgcggctaatagggatgggttctcgcccggataaaaactggcgaaagtttcatcatcgggaagataaagtggcagtgaaagctgtgccggcgtattcagagaagcacctcaaccaaaactggcagaaaaacgtgggcagtttaacacagaaaacgggcgctgttgaaccggcaggatcttatgccgcaatagtgaacaatgcctaagcgccgcttgattggctgcggctcccgccaaggcaagaattatccgatatcattccctaaccccatgcctgcgcaggttaaatttgtcatttaagccaaatctggcctagtataggtaggctaaacgcaatcaccatcaacaaggtttctgcaaggatatagacgatgaaagtatggaataaagtgctgttggcctcctttatcgggttgttggttgccggctgtgatgactcgtccaaggttgacgccaacctggataaagccaaagacagcgccgagcagatgaaagacgccgcccagaaaaaagcggacgatctgacggacaaggcgaaagcgacggcggatgaaatcaaaaaagaggccgccacgcaggctgaccagctgaaggacaaagcttcggcgattaaagaagacgccgccaagcaggcggacgccatcaccaacgacgccaaggccaaggccgccgcgatcaaagatgacgccggcaagcagagccagcagttggtggatcaggccaaggccatcaaaaacgacgccatcaacggcgccaacgatctgaccgagcaggccaaggccaagaccgaagccatcaagaacagcgccgaaaacaaagcgcaagagttgaaacaagagaccgatgcggcggtgaacggcaatactcagactcagccagccacccagcagtaagctattctcagccacaaaagaaaggagcagtaaatggggattatttcctggattatcttcggcctgatcgccggtattttggctaagtggatcatgcccggcaaagacggcggcggttttattctgaccgtcgtgctggggatcgtcggcgccgtggtcggcggctatatcagcaccttcttcggctacggcaaggttgacggcttcaacttcggcagcttcgtggtggcggttatcggcgccatcgtggtgctgttcgtgtaccgcaaaattcgcagctgaggcgaatgccatcagtcaaaagggcagcccctgggctgcccttttcgttacttctgctctgccggttcgtccggcgcgtcgagcacctcttcttccttgcggaacaggctgatgaccttgaacagcaggctcaagccaatgccgacgatggtcgccagcgccatgcctttcagctccgccgcgccgatgtgcaccttggcgccgctcacgccgataatcaggatcaccgaggttaaaatcaggttttgcgctttgttgtagtccactttggactcgatcaacacgcgaatgcccgaggcgccgatcacgccgtacagcagcagggaaacgccgcccatcaccggcaccggcaccgcctggatcgccgccgccagcttgccgatgcaggacaacaggatcgccagcaccgccgcgccgccgatcacccaggtgctgtagaccttggtgatggccatcacgccgatgttctcaccgtaggtggtgttcggcgtggagccgaagaaaccggagaataccgtcgagatgccgttggcgaacatcgaacggtgcaggcccggatcgcggatcaggtcttttttcacaatgttggcggtcaccaccaggtggccaacgtgctcggcgatcaccaccagcgccgccggcagaatggtgaagatggcgaaccactcaaagcgcggggtgtagaaggtcggcagcgcgaaccagtgcgcctcgcggatcggagtcaaatccaccacgcccatgaagaatgacaacgcatagcccaccagcacgccgatcaggatcgggataatcgccaggaagccgcggaacagcaccgagccgagcaccgtgaccgccagcgtcaccagcgaaatggtgatggtggtcgagtcggcgctggcgccttccgccggcagcagccccgccatgttggccgccacgcccgccagctccaggccgatgacggcgacgatcgcccccatcgccgccggcgggaacatcacgtccagccagccggtgcctgcctttttcacgatcagcgccaccaggcagaacagcacgccgcacatgatgaaaccgcccaacgccacttcgtaaccgagcggcaacagcagcagcaccggcgagataaacgcgaagctggaaccgaggtaggccgggatcttgcctttacagatgaacagatacagcagcgtgccgatgccgttgaacagcagcacggtcgccgggttgatcttgaacaggataggcaccagcacggtggcaccaaacatggcgaacaggtgctggaagctgagcggaatggtctggagcagcggcgggcgctcgctgacgccgatggcgcgacgggtcatgtgtgtttttcctcggtttattggttttataggttttagtcaaaaaaaagccgactcattaagtcggctcaaatgtttacttggtaccaaatatcttgtcgcccgcatcgcccaggccaggcacgatgtagcccttgtcgttcagacactgatcgatggaagcggtgtacagttcaacgtccgggtgcgctttctccagtgcggcgatgccttccggcgccgcgaccagaaccagcaccttgatgctgtgacagccggctttcttcagcagatcgatagtggcgatcatcgaaccgccggtggccagcatcgggtcgacgaccagcgccatgcgctcttcgatgttggaaaccagcttctggaaatacggcaccggctccagggtttcttcgtcgcggtatacgcccaccacgctgatgcgcgcgctcggcacgtgctccagcaccccttccatcatgcccagaccggcacgcaggattggcactacggtaatctttttccctttgatctgatccacttcaactggcccgcaccagccttcgatggtgactttttccgtctccagatcggcggtcgcttcataggtcagtaaactacccacttctgaggccagctcacggaagcgtttggtgctgatgtcattttcgcgcatcaggccaagcttgtgttttaccagcgggtgtttcacctcaacgatcttcatcatttttctcctattaaggtggttgcggccaaaaaaatcgcgggattatacctcctttttttcgctgcgccacccacaatagcccgatcgggatcaacaaaagtttgaatatcagtatagatgacgaaaaagcggagccggttcacaagccgctcgcaaacgtttgcctgcgctgttagaattgccgcgccttattccggaatcaacatcggaagcacagttttcaaaccgcaaaccgtcgtggggaatcgcgcagtgaccgacaaaacctctctcagctataaagacgcaggtgtcgatatcgatgcaggcaacgcattggtagatcgcatcaaaggtgtagttaaacagacccgtcgcccggaagtgatgggcggtctgggcgggtttggcgccctgtgtgcgttgccgcagaaataccgcgagccggtgctggtttccggtaccgacggcgtgggcaccaagctgcgtctggcgatggatctgaaacgccacgacaccatcggcatcgatctggtggcgatgtgcgtcaacgatctggtggttcagggcgccgagccgctgttcttcctcgactactacgccaccggcaaactggacgtagacactgcggccagcgtgatcaccggcatcgccgaaggctgcaagcagtccggctgtgcgttggtgggcggcgaaaccgctgaaatgccgggcatgtaccacggcgaagattacgacgtggccggtttctgcgtcggcgtagtcgaaaaatccgagatcatcgacggcagcaaagtgcagtccggcgatgcgctgatcgccctgggcgcttccggcccgcactccaacggctactcgctggtgcgcaagatcctggaagtgagcagcaccgacccgaccgccactcagctggaaggcaaaccgctggccgaccacctgctggcgccgaccaaaatttacgtgaagtccgtgctggagctgatcgagaaggtggacgtccacgccatcgctcacctcaccggcggcggcttctgggaaaatattccacgcgtgctgccggaaggcatgcaggcggtgatcgacgaagccagctggcagtggccggcggtgttcacctggctgcagcaggccggcaacgtcagccgtcatgaaatgtaccgcaccttcaactgcggcgtaggcatggtcatcgccctgccggaagccgaagtggaagcggccatcgcgctgctgaccgcggcaggtgaaaaagcgtggaaaatcggtaaactgactgcctcttccgacgaacaacaagtggtcatcaactgatgaaaaagatcgtggtgttggtctccggccaggggagcaatctccaggccctgattgacgcctgccagcagggccgcatcgccgccgagatcgtggcggtattcagcaacaaggcgcaggcttacggcctgcagcgcgccgaagcggcgggcatcgccgcccaggcgctggatgccaaggcttacgccgatcgcgcggcgttcgacgccgcattggcggacgccatcgaccagtaccagcccgatctggtggtgctggccggctacatgcgcatcctcagcccgcagttcgtgcagcgctatgccggtcgcatgctgaacattcacccttccctgctgccgaaatacccggggctgcatacacatcgtcaggccatcgacaacggcgacagcgaacacggcacctcggtgcacttcgtgaccgaacagctcgacggcggcccggtgatcttgcaggccaaggtgccgattttcgctgacgatgaagaggatgacgtggttgaacgggtgcaaacccaggaacacacgatctatccgctggtggtgagctggttcgtcgacggccgcctggcgatgcgcgacggcgccgcctggctggacggcgaacgcctgcctgagcaggggcacgccgccgactgatgcgcgcagcctgaaccttgcctaaacggcgcccacgcggcgccgttttttttcgccttcatccattctgtgaagttatactttgcacaatttcacggcacagaggagcccacatgtccagcactgccagcgtcaggttacgcccattggaacgggacgatctgtcgttcgtccaccagatggacaacaacgccagcgttatgcgctattggtttgaagaaccctacgaagcctttgtcgaactttccgatctctacgacaaacacatccacgatcagagcgagcgccgctttatcatcgagcacgaaggcgccaaggtcggcctggtggagctggtggagatcgatcacatccaccgccgcgctgagttccagatcatcatcgatcccgcccaccagggcaaaggctacgccagcaccgccgcccgcctggcgatggactacggcttctcggtgctgaacctgtacaagctgtacctgatcgtcgataaggagaacccgaaggcgatccacatctacagcaagctgggctttaacgtggaaggcgagctgatcgacgagttcttcgtcaacggcgaataccgcaccgtgctccgcatgtgcatcttccagccgcaatatctggcgaagttcaaaactcccaatgataagccgctggtgaagtgacaattcgcgagaaaaaagagaaaacccgcccaggcgggttttttattggaaaataattggctagtattaaggcatgctattttatcgtcaggaaacaacctgatgaatacgaaaataagtaacattctccaatataattaatcgaaaaataattaatagtgatagtaagagttaccctctgcctctacaaaggaaaaatgccatgacaaccgtctcaaacctgctgctttttatcggcctggcgatgctcgccatcgccgccggtctaaatacctacagcggctacgcgcctgcagatcccaacagcaccccgctgttttccccgctctggtggacgcgctggttcccgctctatgcctcgggcgctgcgttgttggtggtggggttggtattgcgggttacggggcggggacgataaaaacccaatttcatcgtagatattgcagagcgatatatgcgccatattcattatcaaagcgaatacttctgcaatgtgcatatattgcaaaccgaatcattttaaaacaccaataaaataaacacattatttttattactgcgtaataaaaaacccacttttgcgggttttttattaccggttaacagcttatcacgccactaacagtatcagtaactacgtccaatcttggtagccgtcttcatgaatccagacaaggccaccagggcattcctcttcatagaaccaaatgtcttcattttttgttttccattcctcttctgtcttagggaatacagctttgtaatgtgttacctgttcttcaatgtctccctcaaggaattggccatgtttgcctaaccttactcttccttcagccataaggtgatgaattaattcgaaaaaatagtttttcttttcttcgtaggacaatgtattcctatcaaaattatcagctctcatagctgaccatacggttccaatggaagcaccgtccaactcttcactaaacagtttgtattgatcatcgctatacaacatggttgccctcatcgaaatttgatttctactctttttttcactttaccttgaagcgcattcagctgttcattatctatgatatcaatcgtccaacgtgctttggtatcttcctggctacttgacacactcctaagagttaatttctcacctgttttttcatttaaaaccaccgtccatagtgcatcttttctgacttctattaatggtttccctccggtaagagattgcgcataatcgaagatcgcctgtttcgataaattctcagtggcaaacacttttgtattaccttgcttgttgctgccgccctcacctaatacctgctcgaactgctgaccaaacacgtttagcttactttcgttctgtttcggatcaaacaccttgaccaactggttagtgttagctttctgcatgtcccgcagataatctgccgttttagtcgacaaattcatcccggctgccgtttctcctttgataaaatcggcaaccggctgagtgttgaacgtttttgttttgtatagttcatcggaagcgttcaccagctgtcggctcaacttcctcacgctgtcttcggttttacccaaaatcaatgtgctgccggtcgttacggctcccgtaccaatgatggcctcaggtgcaacaatatctgccgcataaataccggcttggttcaggcaaagcgcggggttggttttgcaaccggcaatcgccaatcttgcagccagaaccaattctggcgcagcgcccaccaacgtcatcccccccgcagtaagtaccagaccgccaccaccgacggtcgccactattgcggcagcctctcggcgagccacaacacgttttgccgcagcaacatcgcctttatcagcggccagaatgtctttctgattatccagcgcatactgcatcaacatatgttcggtcatgttgtagcgataaaccgactgtgcactgtccgcagcgctgtaggcgccttccggtgtatgcgttgtcaacgccccggtcaaagccccgatcactcgtgccgtttgctcttttacttcattgccgtttagcgcctcctgcagacggtagagctggcgttctttttcgttgagattggccggttcgaacaacgtgctctgcataacgacgccggccagctccgccgccagcgccccggcagcagcccctttaccgtcgccgcgcccgatttccgcggcgatgcccgccacaaccgcatgactgactgacttcccggccgcgcccaggacttcgccgttatccccaatcagattggcaccctcggcctgcacctggctgccgatgttcgccagcagcgcattggtcaggttgtccttgaagctgccgccattgatggcggtattcaggctggagctgatgaccgattgcccggccacccgctgcgccactttgctccagtcgccgttgctcagctgcggcagtttgacgttgttcgggttaagcggtttgcccgccgcgtccttgctccagcccatagcgctgtcgaagccgttgagcgcgccgccgatcgccatcgccgtggcagtcgccttgacgttttcattgctgcccagcgcctgcagggttttcgacaggttgccttgattctccactagcgcgactgccgcctgggaggccagcgaagacatcccggcggtgaccgcgccgctggttaccgccccgccgcccacggcgccggaaacgctggaggccgccgtggccgccaatgaactgcctgcggtcaccgccgcggctgcgatggcgatcaccgccgccaccgccgggttcaagtgctggctcttgtaatcccagctgtcgtaggcgtccttgaccttgctccactgcacgtcgttgcgcttattcagatctttgacccaggtagtgcccggcgtattgcccagcgcgtcgatagcgctttgcaacgcctgcccgttttttaccttcacatcggcgctgacgcccttggcggcctctacggtcaaggcgccaccggtatgaatgctcggcagcacccacttattgtcttcgtagcctttattggcctgcttgataaagaagcctttcgaattgctgacggtctgttcgaagctagtgttcttcactgccctgaagttaacctgaccatgcgtgctggtcaggcgcgcgttttgcccggcggcgattttgctggcttcataggtgctgtcgtcgcggctcatcagcgtgatattgccggcggcggtaaactcggtaaccttgttggtcacgtcgtggcgggtctgcttaacctcggttttcttgccccaccatttgcgcttggtttcctttttttcgtaatggctggactcttccatcgcctgggcgtagagatagccgcccttggcggcgatatccatattcccggcgcgcatggcttcagcctggttgtgggcgtcgacctgagctttttgcttagcctcgtctgcccctttgcttttagcttcattgcgtgcggtagtcagacgtgattgtgcgccatcgcggtcttgggtggcctgagagaggcgctgttgtgcatcattgagggcggattgttcggcattgatttcattggggagcgcattcgctcgcttctccttttccaataaatcatgggtaatgccgataccttcggctgcgatggcagcactttgttgccataaaccccagtcgtttatttccattagcttgccgtgcttggctgtaaactcttgagatttcttgattacctccgcttgtctttgttttagcgagttaatgtcacgctgcagcgtagttaactcattgcttttaccgtgcttcgcttgttcagcgcgactcttatcctgctgcgcctgattaatgcgctgctgcgcattttgaagttgctgctcggcaacggcgatgcggctgccccaatcagtcaccgctaccggcggtttccagtttgcccccaaccctttcactaccagtttggtcgcctggaacagaatgctgccgccggaaatcaccgtcatcaggccaccggcattcagctcggtcccttgctgggtgcgagtttcggtaaattcgttgccaccttctcggtaagtgtggttttgcaccgcctcgaagcgcatatcgccgccggaggttagcgtcatgttagcgccggaagtcaacctggcaccgtaagtcagcagttggttgttcgccgccgcggtcaggtttttcccggcgctgagggtagtgaccacatggcgatcgtctttgttgttgtcgttggcagcatcaatggcggaataggcgacattcgataaccatagattctgcccggccagcagcgtgatattgccgttggcggagagcgcgccgccctgggtgccgatgtcgcgggccgagttaatcagtaaattaccgccagcgtgtatcttgctgccgagttctggggtacgtgaggttgcaaaaagatgcccagaattaccgcccagcgcccggtagttgaggtcggcattatgcccggccagcagcgtcacatccttgccggcattgatgttgacaccgcgcagcgccagataaccgccgctattgagtgagaccgagccggtggcgttcagttttcctgtgttcaacaggccattgaagtagtgttgcagcttgtctgatggcagatattcaccgggacgatcgcgcatcagtacggcatcatttttgataagagagatgctaccggaagcagtcatgctgatattgcgactttgtggcgccagcaacgtattgagcagcgtaatggtgctgcctgcagtcagcgtcaggtcacgagaggccagcagactgcccagccaacgcacaccattctgatggtagtaattaggcttttcgctggtgtgaacttttatctcaccggtacgcgcggtaagcgtgatgtcttgccctttcagttcgctttgccatacatcgatagtattaacggcgctcaaattcagctctttgccggcagaaaggataccttgacccagcacgatgcggtcttcggcgatagcggtgatgttgcctaccgcgttgatggcatcggtattgacgatattagccgcatgcaggagtacattctttgccctgatagtttccgggcgcccagccgtattgatgtcgtttaattggctttcatggggcatcaccgttctgatttcgatctgattcttgaagtctgcagtcagattgccatcagcgaccataccgccatcaattataccgtcataactccaacggaaagctcgctctccggtatcgacataacttaatggggggtaaggccatcccagcttttcatattggatgtaagcttccgtatctggtttaaatttgttgaagcgttcttttgtaccaaaggcgtggttgatggaactgaaggtattacctgtaaggatcatatctcctttagccttcagttggctggcatcattccacaatgagccagcattaatgtagctgtttttgccagacgctataatggcaggagaagaattagaggtaacgcgggttcgaactcgctcatcgagtatccaattagctaagtgccgatttgcataagtacattcctccgatgtcgtgcaaggtagcagccatttctcccacttcgacatgtcttctttataaagatcttgtcggttttttatatctccgtttttatacgcattgaatacgctaccaaataatcgcattccttcttgatcaacaggctctatttggtcagaaatcgccaatgtctgccgcacgttatcaagcttgttggtacgaataaccaaatcgccactattggtctgaatgcgcgcggagcgattttctatctgtttagatttattcccctgagcatctttctggatccaaagattattgttgctatgcaatgcggtgttgtcaccatcacgtaatgccacattgcgtatcgtatcggcaaacacccgcatatcgcgatgtgccgtaacattaccgttgttattaagcgtatcagcggccatcgtcacgtcacgttccccacgaaccttcacgcccgatgagatatgaatttctctggcgctggcgttcaagtctgtcgcggcgtgtgtattgcccaactcaatcatcccgttaacgctcagcgtaatatcccgctgtttgctggtgaggtctttcaggttcacccctactccatcctcattggccaccaggcggattttgttggcgtacatgccgcccagcgccttggtatccacggccagttggggcttagcgccttcaccggcgatcggtttgatgctgccgtccttgaagctgatgcggttggcgccctgggtcagcgacagattttgtgcattgattttgccgttcagctcggtggcgcggctgatgatatcgacgtagtcggcgccgctaccgtccagccctttaccgccgatggtgacaccgccttttttcacctccagcgcttccagcgcgccctgcttgtcgaactgcggtttgccggtggtcagcgtcacgcccggcgcattgataaagccgcagccgtcgcaggtgatgccattcgggttagcgatcatcacgttggccttgttgccgaatacctcgagcttgccctgcagctcggaacgactgccgccgatcacctcattgatgatcaactccgccggttttcccttcaggtaggtgttgccctgcgcgctgtagatctccacgcccagctgcgttttgccgccgtgcgtggcgttattcaacacggcgccctgtggcccaacgttgaaatctttataggtgttgtgcgagatgcccgcaccgttcggcgtggcgatattcaccaccggtacgtcgcccggcttgataaccacctgcgtattgccgttagcggcggtgataccggcagcgaacgccgggtgcaacggttggaaagccgtcaggtagatcagcaaatagctggcgccccgcgccaacggagggttgagcttatccatattcattccttcgaaaggatgttgttgtgaacgccgagggcgttcctgctgtgtgctggcgttataacgtgacggtggcttgccagtaggccacccaacgatccggttgcaggctgtctgggtgcgtcagcggtttaccgacggtgatcgcctgattaaaccaacggccgcttagcgtggcgcccagcgccgcaccgacgacgctgccgccgtctatctgcccggcgcgcccctgcagccagccggcgtctaacgcgccggtcaaagagagctcccccagtcccggcaaggtctgccattgccagttgagttcattgcgccagtaggcgccgcgattaccggtcaggtactgctctttaaagccgcgcaccgagtattgcccgccgatggaaatgcgctcgccggcatacaggttgtctgcgctggtttgcccgtaggccgaggtcaggtagtaaagagagggggcgagcggatagaaataactggcgctgaggccaagcttacggaactcgctgcgcggcgccccgtttcgctcaggatcgtcggcggtggcgcccagcatgcgcagcccacggcttatcgttgggttcagcgtcatataaccgccgcccgtgaccgtactgtaattgaggcccaggctggcgatgctgagcgtcgggctgctgacgctcaaccgttcccccgccagcttattttccgtggtgcgccgcgccagcccgatatccacagccagcttacgtttgccatcccgcagcaacgtgcggttggcgcccaaacgctgggtctggttattgccctgatagcggtaagcggcaccgttgaacggcacctgctggaaaaaatcgttccaggcatactgatagctgaacagccaatagccatagggtaaggtgacgctgccgttcaggctgcggctgcgatgatgcgggctgaaatcgttattgcgcgctgcggaaagcgaccattgatccgcaagacgcagcggattatccagcgagaaggcggcgttcatctgtccggtgccggtgcttttctggccgctgttatccgcgccgaaagaaaaagaaaccggcgcgcgcgtggcgccacgcagcaaaaccacgttggaaaagccgggttgctcgccaggttggatatcgatagtcacctgttgcgagggcaggcggttgagctgctccatgccctgctcaatatcgcgcagattcaatacgccaccaaccagaccggggaacgccatcttcaacgctggcgtctgctcgccgttttgcgtgatggactcgattcgcccctcgctggcgctgacgatcaacacgccgcgggagatatcctgctcctgcagccaggcctgtgaggtgacatagccgcgttgcagataagcgttggtggtttcgcgcaccagacggttgatgtgctccagcgtcaggcagcgcccctgatacgggcgcgccaggctttcttttaccgaccaggaaagatgctcggcgccctcaaaaacaatctgccgcaccggctggcaaaccgctcctgcggcggccggcacaggcagcggtaacgcctgcaattcaacgttattttgcagcgcctcgcgctgttgctgggcctgttccagcaacgttttctgctgttgggtaatgctgtcgcgatcggcagggctggtgatttccgcgcaccacgcagagctgcaaaacaccaaaagcacaggccaaaccctcggcttccatgcacacatttaaatacatccatttacattaatttacacaccttagcggagtatatacattttatgccaccaatcaataataatgagaattatttttgtttgatctaaatcacaacgcggaaaaaatgcgcatatgccacagctactgcagcttattacccagagcgcatttaattaatattaaaattaaaaaaaagaataataaaaacaaataaattcaatataaaaataacacgctcaatatcgacaaaaacaaacaagcagagtttacaaagttaattcacccttttatcttggtagttctattcgcataattaattcataaaaaacatagttattagttaatcaataaagaaaaaatatcgggaataatctcatgtttaaccgtgatatagaactgtttattcgtgattacgttaatgatattaaggctggcagcgctgcgctgtttgccggcgccgggctgtccatccccgccggtttcgtcagctggaaagagcttatcggcgatatcgcttatgaactggagctggatatcgaaaaagagagcgatcttatttccctggcgcagtatcacctcaatgaaaaaggcaacagacataagataaatcaaaaaatcattacagagttcgctgaacaggcggaagaaacagaaaaccaccggattatcgccagattaccgatagcgtcactttggaccactaactacgacgacctgattgaaaaaagctatgcccgttataatcgcgtatgcgacgttaaaaccacaccggaaagcctgaccaataacattcacaaacgtgatgttgttttatataaaatgcatggtgactatagaaatcccaaccaggcgattatcacccgcgaacaatacgaaacttactcccgaacacaccttccctttatcaacatgctgatggcggaactgaccgctaaaacgttcctgtttatcggtttcagcttcgaagatcccaatctgcagtatgtgttgagccgcctctatgcacagtatgccgaagggaaaagaaatcactactgcattatgcggcgcgttcagctcggcgacagcggcagtgaagatcaggcgtcctgtgactacaacagccgtaaacaaagcttgatgatcaacgatctgcgccgttacggcattcaaacgctgctggtggatgactatcggcaaatcaccgacctgctgtatgccatcgaaacgcagtttaagaaaagcacggtgtttatctccggcagcgccgacaactaccatccttatgcccgtgaagagtccatccagttcatacatcgtctggcgcgcctgcttatccgcaaacagcaccgcatcgtcaacggcttcggctggggcgtaggcacggcggtgatcaacggcgcactggaagccatttacgacagccaagggaaaatcagcgaaagccaactggtgctgcgtccgttcccccaattcgccagcggcggcattaccctaccggcactttggcacgaataccgtcagaacatgatttcgctcagcggcatcgcaatctttttgttcggcaacaaacgcaacgccgaaggcgaatacgtgctggccgacggtttattgaaagagttccagatcgccacggaacaaggctgcgtctgcatacctatcggttgtactggcagcgcatccgccgagatctaccgaaaaatcaaggaggaaatgaaagaaaccctctaccaccgccaccccgccgccatgaatctgctggatcagcttaacgaaccgggcagcctggcggagaagaaaaaatgcctgttggcacttatcgatatcattactaaggataacccccgatgaccagaaaatgtttttacagtttccattatgagccggacaactggcgcgcttctcagatacgtgaaatgggcacgctggaaggtaaccggccggccacggataatgattgggaggaggtgaaaaaaggcggcgataaagccattgccgattggatcaaaagccagttggacaatcgcagttgcgccgtgattctcgccggtaaagataccgctaatcgcaaatggattaatttcgaaatctgcgaggcctggaaaaaaggcatgggcgtgctggtggtgtatatccacaatttgaaagacagcgccggcgaccaaaccacgaaaggtaaaaacccgttggatcacatcaagctgggtgacacaaaactctccgctatcgccaaagcctatgatccgccttacctgaccagcaccaatgtctataaccacatcaaagaaaatctggctgagtgggtagaagaagcgatccgcatccgcgcaaattactgatgcccctgatagacaaaaggctgcatgttgatgcagcctttcgtttgtttatagcccaaacgcctcacccataccgcccagtaatataatcctcggtgcggcgctggcgcggcgaggtaaaaatcgcgtcggtatcgttgtattccaccagccgcccctgatgaataaaggcggtgtagtcggagacgcgcgccgcctgctgcatattgtgcgtcaccagcaccacgctatagcgctgcttgagtgcggaaatcagctcttcgatggtcagcgtggagatcggatccagcgccgaggtcggctcgtcgagcagcaacacctccggctcgatggcgatggcgcgcgcgatcaccaggcgctgctgctggccgctggacaagcggaacgcgttttcgcgcagccggtccttcacctcatgccacagcgcggcggcgcgcagcgaacgctccaccgcctcatccagcaaacgccggtcgcgcacgccctgcagccgcaggccgtacaccacgttttcatagatcgatttcgggaacgggttcggccgctggaacaccatgcccacccgccgccgcagcgccgccacgtcgatctgcgcgccggagatcgccgcgccgttcagctgcagttcgccctcgatacggcagttgtccaccagatcgttcatgcggttgaaacagcgcagcagcgtcgatttaccgcagcccgaggggccaatcaaagccgtcacccggtgcttcgggatacgcagcgaaatatcatgcagcacctgtttgtcgccataaaacaggttcaggccgttgaccgccagcgcggtctgttcatcgtcgagatgctggacatccagccggggcaaactgcctggcgtcatcaaacccattacgcactccccaaaaatagcgtcattgttactgcgaccatgctcggtaccgctccctcaacgaatggcggatacccatcgccgccagattcaaactcaccacgatcgtcaccagcaggaaggcggtggcgaacaccagcggccgcgccgcctctacgctcgggctctggaatgccatatcgtagatctggaagctcaaatgcatgaacttccgctccaggtgcagatacgggaaaatctcgtccaccggcagcaccggcaccgatttcacgacccccaccagcatcagcggcgccgtctcaccggcggcgcgcgccaccgccaggatcaggccggtcatcatcgccggcgccgccatcggcagcacgatgcgccacaacgtctcggcccggctggcgcccagcgccatcgagccctgccgcagcgaggcgggaatgcgcgacagcccttcctcggtggcgacgatcaccaccggcagcgtcagcagcgccaacgtcagcgccgcccacagcacgccgggcgtaccgaaggtcgggttgggcaaggactcgggatagaacagctgatcgagcgtgccgccaatcatgtaaacaaagaagccgaggccaaaaacgccatagacgatcgagggcacgccggccaggttgaccaccgcgatgcggatcacccgcgtcagcagattgttgccagcatattcgtgcagatataccgccgcaattacgccaaacggcatcaccacgatcgacatcaggatcaccatcaacaccgtgccgaaaatggccgggaacaccccgccttcggtattcgcttcgcgcgggctgtcggtgaggaacttcttcacctgctcgccccagtgtgccagcttctcggtggtgttcatggcgttcgggtaccaggcatcgcgcacctggctgagcggaatggtcaacgtctgcccgtgcatgtcgcgcagcagcaacgcatcgcgctggcgatcgcggttcagccccgccagacgttcggacaacagctgatactgccgctgcagttccagccgttcggccttgatggcgtcctgtgcgcgggcgtccagcttatcgtcgcgctgcaggcgcttttcccgcagccgcagcgcgtcaaactgctgattgatgcgcgccatgtcgcggaattgaatgtcgtgcgcctggcgcgagagcgcggcgatttgcggcaggcgctgctgcaacgcctgccccagattgcggccagtcagcggttgcccgtcttccagcagccccgccagataaccgtaagcggtgccgtggctgtcgcgttccagcaccagcaggctgcgcggcgtgctttggctgtggacatcgctggccagcaaggtgcggaaatcctgcccctcgcgctcgcggttgccgaccttaatcagatagcgttcgacgctctgcgcctcgcccggcggcgtaacgcccgcctcggccagctggcgccgggaaatgctttgctgctggtacagctcaccgatcaccgtcaccggtccggcgccgttctgattgagttcgaactgataaaccgggctcggccagaaatagcgcatcccctgcccggccagcagcaacagaatgccgatcagcgccagcaggctgacggccaccgaaccggcggtcagccatatccacggcgacccgctcttcacccagttcttcatggcgcctcctgattcggcgtgtagcgcttgcgcagccgcaggcgcaccgcctccgccagcgtgttgaacacgaaggtgaagacaaacagcaccagcgcggtcaggaacagcacgcggtaatggctgctgccggagaccgcctccggcatttcaatggcgatgttggccgccagcgcgcgcagcccctggaacaggctgccgtcgataatcggcgtgttgccggtagccatcagcacgatcatggtttcccccaccgcgcggccaaagccgatcatcagcgcggagaaaatgccggcgctggcggatggcagcaccaccttgatcaccgtctgccactgggtagcgcccagcgccaaagaaccctggctcagggtcgccggcacgctgaacagtgcgtcctccgccagcgagaagatgatcggcaccagcgcgaagcccatcgccacacctaccaccagcgcattgcgctggtcataattatcccccagccagaaatgcagcggctcaccgaacaacgccacctccagccgcggccccaggttgagcgccagccacaccgtcaacgccagcagcggcagcagcaacagcagatcgacgcccggccggcagcgcggcataaagcgatgggtcaacgcgccgcacagcagcaccgccgccgccagcagcagcggcaacgccagcaccgccaacagatactgctcgatgatcggcgccagccaaatgccggccaccagcccgatcaccaccgtcggcagcgcgcccatcacttcgatagccggtttgatcacccgccgcagccccggcgtcataaagtaagcggtatagatggcgccggccaaggccagcgggatggcgaacagcatcgcgtaagccgccgccttaaaggtgccgaagatcaccggcatcaggctgaatttgggttggtaactgtcttcgccggaggtggactgccagacataggccggctgcgggtagttctcataccacaccttgccccacaacgaacgccaggtaacgtccggataagggttgtcgagcgcatagcgctgccagccctgcgcgctctccagcagcaggccatcgccgcgcggcgcgaacgccatctgccgcacctcggcgcccaaacgggtattcagcagcggctgcggttgaatggcggagaacagcgagaagccgccatcgggccgcagggtggcgaacacccggcggtaaggctcagccaccgtcagctcctgcccgtcggcgccgtggtcgaaatgctgcaccggcgtcagacgccagcgccgatctttttccacctcgaaccactcgcgcagattgccgtcggcgcccttgatcagcagcgcgctgccgccgggcagcgccgtcatctgatacggggcgtgttcgccaagggtacgcgtttcacgcagctgcagctgtgcgccgtcgatctgataacgcgccagccggttgccggtcagcagataaagctggcggccatccggcgtcagcaccagctgctccccgtcgtgctccagcggccgctcgctgaactgcggcggccggtcggggctgaagcggccgaacaccagccgccgatcgtcggtcactccggccagcagatactgcccgcgatgcgcatccgccagcgacagcagcttcagcggcttgcgctgtggatccagcgccaatggctgctgcccgagcgggaactgccactgcggccggccgttttcagccgtggcgaaatccgcgcgcgccaccacaaaccggccgtcagcctgcgccagcgcaaacagatcgcgctcgccggcggcctgcgcgagcagcgtcggtttggccaacagcgtctgctgcgccagcggcatctgggcctggccgctcggcgccggcgtcagacgataaaattgccccgcgccctgcgcgtcgatgcgataaccgacgcgctgctgcacgtccatgcccagcgccagcgccggggccgataccgtgaacggcagcggctgcgcctggccgagcgaggccggtttgaacaacggcagcaccgcaaacagcagataaacgaagatcagcatcaacgtcatcagcaccatcagcccgctggcggtcactgccgcctgcacgccgcggtcgatgcgcccgcgcatgcgatctcggggatgttgattggccgtcgtctgtgtcatgtgtctcgctgtcgctgatgtaatcgggcttgcgccgtaagataaccgggcatcttatgtcagttttatgacgtttgcatgacaaagttacccgccataactcaggttttttacactgccatcagacaatatgaatttgatatattgctgaaaaatgaccataaacacgctttataacgccaagaataagcctgctaaccgtcatttcatgctgatcgtttcactgccgggcatcccgccgcggggaaaatttattgccgccgaaaaacgccgcgcgccaacgcaatggatatgttggactttcctgtcaatctctcgcaataatgatgaaggacactagagcggcatccgggcgctgcgtcccggatcctattctaaatttgaactggagtggcaatgggtcaggaaaagctctacatcgaaaaagaactaagctggttatcctttaatgagcgcgtgttgcaggaagccgcagataagagcaatcccctgattgaacgtatgcgttttctgggcatttactccaacaacctcgacgagttctataaagtccgcttcgccgatctcaaacggcgcatcctgatcagcgaagagcaaggctccgccggttcctcacgccatctgctgaaaaagatccaggccaaggtgctgaaaaccgatcaggagttcgacggtctgtacaacgatctgctgctggaaatggcgcgcaaccagatcttcctgatcaacgaacgccaggtgtccgagaaccagcaaatctggctgcggcaatatttcaaacagcacctgcgccagcacatcacgccgatcctgatcaaccacgacaccaacctggtgcagttcctgaaagacgattacacctatctggcggtggagatcatccgcggcgcgcgcatcgactatgcgctgctggagatcccgtccgacaaggtgccgcgcttcgtcaatctgccgccggaagcgccgcgccgccgtaagccgatgatcctgctcgacaacatcctgcgttactgcctggacgatatcttcaagggcttctttgactacgacgcgctcaacgcctattcgatgaagatgacccgtgacgccgaatacgatctggtcaccgaaatggaatccagcctgctggaactgatgtcctccagcctgaaacagcgcctcaccgccgagccggtgcgcttcgtttatcagcgcgacatgccgaacgagatggtagagctgctgcgcggcaagctgggcatctccaactacgattcggtgatcgccggcggccgttaccacaactttaaagatttcatcagcttcccgaacgtcggcaaggccaacctggtcaacaagccgctgccgcgcctgcgccacatctggttcgacggtttccgcaacggcttcgacgccattcgcgaaaaggacgtgctgctctactacccgtaccacacctttgaacacgtgctggagctgctgcgccaggcgtcgttcgatccgagcgtgttggcgatcaaaatcaacatctaccgggtggcgaaagactcgcgcatcatcgaatcgatgatccacgccgcgcacaatggcaaaaaagtcacggtggtggtcgagctgcaggcgcgcttcgacgaagaggccaacatccactgggcgaagcgcctgaccgaggccggcgtgcacgtgatcttctcggcgccggggctgaaaatccatgccaaactgttcctgatttcacgccgtgaaggcgatgaaattgtgcgctatgctcatatcggtaccggcaactttaacgaaaaaaccgcgcgcatctacaccgactattcgctgttgaccgccgactcgcgcatcaccaacgaggtacgccgggtattcaactttatcgagaacccctaccgcccggtcaccttcgataacctgatggtgtcgccgcagaactcgcgcctgaagctgtatgagctgatcgacaacgaaatcgccaacgcccaggccggggaacaggccggcattatgttgaaaataaataatctggtggataaagggctggtagatcggttatataccgcgtccggcgccggcgtgaagatccgtctgctggtgcggggcatgtgttccctgattcccaacctgccggggatcagcgacaatattcaggtgatcagcatcgtcgatcgctttttggaacacgatcgggtttacgttttcgacaacaaaggtgacaaacgggtgtatctgtcctccgccgactggatgacccgcaacatagattaccgtatcgaagtggcggtatcgctgctggatccggcgctgaaacagcgcgttctggacattctggagatcctgttcagcgatacggtcaaggcccgttatgtggataaagaactgagcaaccagtacgtgccgcgcggcaaccgccgcaaagtgcgcgcccaggtggctatttacgagtatttaaaagctctggaacaaccaggacagtaggccagcaactatgccgctaaaaaacactgcaacgaacaaaccgcaggaaatcgccgccatcgacctcgggtcgaacagtttccacatggtgatcgcccgcgtcgtcaacggcgccttacaggtattgggccgtttaaaacagcgggtgcacctcgccgacggattggacagcaacaacgtactcagtgaagaggcgatagaacgcggcctggcctgcctggcgctgtttgccgaacggctgcagggcttcccggcggataacgtcaccatcgtcgggacccacaccctgcgccaggcggtgaacgccgaagtgttcctcaagcgcgccgccaaagtgatcccctacccgatcgaaatcatcgccggccaggaagaagcgcgtctgatcttcatgggcgtggaacacacccagccggagaaaggccgcaagctggtgatcgacatcggcggcggctccaccgagctggtgatcggcgaagacttcgagccgctgctggcggaaagccgccgcatgggctgcgtcagcttcgcccagctgttcttccccggcggcgagatcagcaaaaacaacttccgccgcgcgcggctggctgcggcgcagaagctggaaacgctggcctggcagtaccgcattcagggctggcagtatgcgctgggcgcctcgggcaccatcaaggccgcccacgaagtgctggtggcgatgggcgaaaaagacggtctgatcaccctggaacgcctggaaatgctcgccgaacaggtgctgcagttcaaaagcttcggctcactgagcctgccggggctatcggaagatcgccaatcggtgttcgtgccggggctggctattctgtgcggcgtgttcgatgcgctggcgatccgcgatctgcgcctgtctgacggtgcgttgcgcgaaggcgtgctgtatgaaatggaaggccgcttccgccaccaggacatccgcagccgcaccgccaaaagcctggccgatcactacaacatcgaccgcgaacaggccaagcgggtgctggaaaccaccgaactgctctattcgcagtggatggcgcaaaacaccaagctggtgcatccgcaattggaagccctgctgaaatgggccgccatgctgcacgaagtggggctgagcatcaaccacagcggcatgcatcgccattcggcctacattctgcaaaactccaacctgcctggcttcaaccaggaacagcagctgctgttggcggcgctggtgcgtttccaccgcaaggcgatcaagctggaagagctgccgcgcctcaacctgttcaaaaagaaacactacctgccgctgatccaactgctgcgtctgagcaccctgctcaacaaccagcgccagtcgaccaccacgccggaaacgctgcgcctgaccaccgacgacaaccactggacgctgcgcttcccggccggctacctggcgcaaaacaacctggtgcagctggacttcgagcgcgagcaggcctactggaacgacgtcgtcggctggaagctgctgatcgacgaagaaggctcgcaagacgaacagcgctccgcctgatcccccgccccctgccagccagggggtttttctttccgccctcgctccgccaacctaaacgaaaccctaatacgccgcgccgctcgccggaaaaaaatggacaacttttgtcatcagcgcctaaaatccggttacaaattctcgagcgaataacacaggacaccggcataccgggtgatatatgcgcaagaaaaccaccggacagatgacgaagatagtgttgtttatcagctttatcattttagtcggccgactgctgtacgccgccgtggtggcggtgcctcatcatcaggaaaaaaaacaggccgctgcgcaaaacgccgccgaagtcagcgcgccgcaacaggacgcctcctctgaataaccgccgcgccccgtccgtttcataaaaatgactccggcactcgctatgctctatcttttaatgagcctgcgtcaggaacgccgagcgcccgttaaggaacaccatgtcagccgcaacccataacgtcaaaaaagtcgctgaacaccgccagcgcattctcactctgctgttgaacaataaggaattggtcgacggcattctcggccggccaggggatgaacacgccctcagccaaagcgaactgctgaaccaaacggcggaaatcaccggcctgctggacgacatgcacgccgccgacctggcggacctgctggaggcgctgccgcaggacgaacgtatggcgctgtggcggctggtgggcaacagcaagcgcggccagacgctggtggaagtcgccgaaccggtctgggacagcctgatcgaagaaatgagcgacaaagacctgctcaaagcgatcaaaacgctggacgtggacgaacaggcctacctggcgcaatacctgccgcgtaacctgatgggccggttgctgacctcgctggagccggagcagcgcgcccaggtgcgcgagatgagccagtacgccaaagacagcgtcggctggatgatggatttcgaactggtgacggtgcggccggacgtcacgctcggcgcggtgcaccgttttttgcgcatgcgcaaaaccattcccgacgccaccgataaactgttcgtcaccgatcgcaaaaacaccctgctgggcgaactgccgctcaccgcggtgctgctgaacgacccggagatcccggtacgcgaagtgatggacagcgatcccgccacctttcagcctgaggacaaggccgatgaagcggccggcgcattcgaacgttacgacctgatcagcgccccggtggttgacgccaagggcaaactgatgggccgcctgaccatcgaagagatcgtcgacgccgtcaacgaagagagcgacaccaacctgcgccgcatgggcggtttgagcccggaagaagacgtgttcgccccggtcagcaaggcggttaaaacccgctgggcctggctggcgatcaacctctgcaccgcgtttgtcgcctcgcgggtgatcggcctgttcgagcacaccatttcccagctggtggcgctggcggcgctgatgccgatcgtcgccggcatcggcggcaacaccggcaaccagaccatcaccatgatcgtgcgcgcgctggcgctgcaccagatcgaagtcggcaacatctcgcgcctgatgctcagagagctgggcgtcgccatcatcaacggcgtggtgtggggcggcatcatgggcgtgatcacctggctgctgtacggcgacgcggcgatgggcggcgtgatgacgctggcgatgctgctcaacctgctgctggcggcgctgatgggcgtggtgatcccgatgaccatgctcaaactgggccgcgatccggcggtcggctcgagcgtgctcatcaccgcgctgaccgataccggcggctttttcatcttcctcggcctcgccaccctgttcctgctgtaagacgctcaaagccggccccgcgccggctttttcgtcattctgtcgccgggtttgcgctaacgcagtaaagtcggccctcccgataggttttcctcccgcgctgtactaccctttttcaataaatcatcttgattcatccacgtcatgaatccaatcacaggcagaggtcatcggtaaggatgtctatggatatcagcgcgccgaacgcgttcggcacacacaaaggcgttatgctgacacattctctgttcgtggcgctggcgacatttttgctcgccttgctgagcctgtcgttatccagtgaggctcatcacttcacgccgctgtggttcccgaccgccgccgcgatcgccgtgctgtatcgccatcctccgcgtcattggggtttgccgctgctggccagcggcacaggcatcgtactcgccagcttcctgctgttcggcttcagcgccattccggtcaagctggccgccatcaacctgctggaagcggcagtgtgcgctctgctgctgcgccgcacgctgccggcgatcgatccgctgagcgatctgggctgttggctgcgcttcgtggtctgcgcggtgatctttaccccgttgttcagcgcgctgctggccgccggactaacccccacgccggacctgacgttttggcaatcgttcggcacctggttcatctctgaagcgataggggtgctgtcgctggcgccgctcgggctcacctatcaccgccgtctgttggccgggctgaatccgtatccgctgctgttgaccctgatgggctcgctggccttcagctatctggcgctgacgcatctgcccttcccctttaccttcgtcatcctgccgctgctgtgggcggctatcgccctgtcgcgcttcgaaaccttcaccgtctgtttctgcactctcctgctgatcaccgtcctgctgtcgctgggtctgctgcaccttcagtcttcccagcacactttcctgggcgaactcggcctctatctgccgatgttgctgatcctgatcccggcgcacgccatggcgatggtgatgcacaccttccgggtggaaaagcaacatatcgtcgagagcgaaagccgctttcgcagcgcgctggagtattccgccatcggcatggcgctggtgtcgccggagggcaaatggctgcaggtcaatcaggcgctgtgcaagctgctcggctatccgcccgaaagactttatcgcctgacctttcaagagatcacccacccggacgatctgaacgccgacctgacccaactgcacgaactgctcgacggccatatcagcagctacaccatggagaagcgctatatccgcagcgacgggcagacggtctgggcgctgctggcggtctcgctggtgcgcgacggcgaaggccggccgttgtacttcatctctcaggtggaggatatcagcgaccttaagcgcagcgaggcggagaacaaccggttggtggagcgcatcacgctggccaaccaggtgggcggcgtcggcatctgggaatgggtgatgagccaggaaaacttcacctgggatcagcgcatgttcgaactctacgatctcccccccgaccaaacgccgacgctggcgttgtggcgcaccctgctggtgccggaagatcgcgagcgcaccgatcgcgagctggccgagatcctggcgcagccgcgaccgttcgtcatggaatttcgcatcactacgcgcagcggcaaagtgcgccatatccgaggccagggcaacgtgatcctcgacgatcagggccggccgctgcgcctgatcggcaccaatatcgacatgaccgagctcaagagcctcgccgaggcgctgcacgaagagaaagagcgcctgcacatcaccctcgacgccatcggcgaaggggtgatctccaccgacagccacctgcgcatcacctttatgaatccggtggcggaacagatgtgcggctggccactcgacctggcgatcggtatgcccgtcgccggcgtggtgcgcctgaccaacggcaaagacggcccggaaatcgaaaacctcacgcaatacccacggcaatggccggcggattatgcgctggtgctgcacagccgcgacgggcgttatttcgacgtacagcagtcggtctcaccgctgaaaaccctcgacggggaaaccatgggcgcggtgatggtgctgcaggacgtcaccgcctcgcgcgagctgatgaaaaaactcagctacagcgcctcgcacgatgcgctgaccggattgccgaaccgcacccgcttcgagaaacagctgaaagcggcgatcgtcgccggcggggaaccgtcgtcgtcgcattcgctggtgttcctcgatctggatcggttcaaggcggtgaacgacaccgccggccatgcggcgggcgatgccctgctgcgggatatcgcccagctgatgcggcaccaactgcgcggcagcgactgcctggcgcgtttgggcggcgacgagttcggtctgatcctgtacgactgccggctggaacaggccaaatcgctggtgcagcaagtggttaatcaaatcagccagcacccgttctattgggaagggaagatttatcgcgtcggcgccagcgccggcatcacgcgcatcagtgccgacgccaaaagcagcgaactgttggcgcaggccgatatcgcctgctataccgccaagcaccaggggcgcggccaggtttatctgtacgaaacgcggcagaaacagctgctggagcggcaacacgaggtactgagccagcaggaagtgcagacgatcatcagcgaggggcaactgcggctgctgactcacgcggtcgcgccgccggcgacgccgctgtcggccgcgtttcaccaggtgaagctgcaggtgatggcgccggacgagcgcccgctgtcgcacgaggcgttcatcaccgccgcgcagctgtacggcctgatgccggacatcgaccgctggacggcggcgcaactgctggtgaaatatgccgacgacatcaaacgcaaagggctgtcgctcgcgctgccgctggccatcgacagcctgctgagcgccgacttccagcgctacctgacggaaacggtgcgcgcttcctcgctgccgccgcaggcgctgctgttcagcgtcgatgaggccgcgatactggagcacgccgcacagtgtcgggcatttctccgcgaactgcagcagcagggctgccggctgatcgtcaacggcttcggacataacatcaatgcgttcgatgaactcagcgatcagaagatcgacatcattcgcatcgatgagcgctttatcaccaacgtgcactgcaaccagatggacgagctgatggtctcgatgctcaacggcgcggcgcatcgcattaaagcgcagaccttcgccgggccggctcaccagccggtgacgctgcaggcgctgcgcgacatcggcgtcgatctggcggacggcgaccaggtggcgctggagcagccgctggcggtgttgctcagcgacggctatttcggcatccgttaaccttctcccccctctcaggcgccgtctcccaggcggcgcctcgcatctcgttcgttacatgatattaaccaagacaagattagtgatataaataacacctgaagcttaaacgattaagtaagatgaagcgcccatgcgactatcagcgtatccgttgattttcctcggcatgtgatggctcagggataagggactatggaaaagaaatggttttccgccagggaactgatgggtaaggcggggttgccttcaactccgcaaggggtcaatttgatggcccggcgtgaaggctgggtcagccgccgccgcagcggcgtacagggcaaagcgctggaataccatatcgacagtctgccgttcggcgcgcgcagcctgtcggcgttgcgcgaaaccgaccatccggattacgacgtcaaacgccaggatccgatacgggtctggatcgagtattactaccacctgacgccggccgagcgggaaaagctgctggcgttcctgatgcgcgagggcatgagccgcctgctgcagctgatcgacacccctcgctagctctgcgttcaactctcccctttcggcgcccagccgtcgttgtgccacagatgcagcgtggcgtaagagcgccacgggcgccaacgttcagcgtagcgttctatctggcgcggcgtcatgccgggaaaacgctgtttgatcaggtaatcgccggccaggaacacgtccggccacgaccaggcgcgcatcgcgatatagctggcggtccagctgccgatacccggcagcgcggtcagcgccttgatgccctgttcgatatccagcacgttgtcgagctgcagccgcccttcgcccagcgcgcgggcgatctcgatcagcgccgccgcgcgcttcagctgcaccccgagcgggcgcagttcttcgggctgcagctgcgccacccgttctgcggaggggaagacatgggtgatgccctcatgcggcgtcgccagggtttccccccagcgttcagccatccgcccggcgaaggtcgccgccatttttacgctgaccaactggcccagcaccgcccgcgccgcctgctcgaaactgttcacgcagcccggcaggcgcaatcccggcgcatcggccgccagcgagcccagcgcctcattgatgcggtccggcgcggcatccagatcaaacagcaggcgcacccggcgcaacacctccgtcgtcaccagactgagcgcaggcgcgatctctacccgaacccgattgcgcgcttcttccggctgcacgctgacccagccgcggtgttccgtgccgccctggctgacggcgatcgagcgcaggtagcggcgtccgtcgacccgctccacgccctgcacggcgcgcgcctgcaagaaattcagcatgcgctcccagtcatagggcggccgatagcccaggtgaaacaccagcccgctggcggcggcccgttcaccgcgcgcgccgccgctgcgcagcgctgacgggatcaggcggtagcgcgccttgaacagctcgttgaaacgccgcaggctgccgaatccggcggcgaacgccacctcgctgagcggcagatcggtgtccgccagcaggcgtttggcctgcagcagccgatgcgactgcgcgtaatcgatcggtgaggcgccaaactgttcggcgaaaatgcgcctcagatggcgatcggaaatgcccagccgcgccgccagcgcttcgcagctgtgttcagacagatacccctgctcgatgagctgcactgccacctgcgcatagcggttgcccagatcgatcagcgccagaccgggcgccagctccggccggcatttgaggcaggggcgaaatcccgccaactctgccgccgccgcgctcggataaaaggtgcagttttccagcttaggcgtgcgggcgctgcacaccgggcggcaataaatgccggtggaggaaacgccgacgaaaaaacggccgtcgaatttgcggtcacgcgcgcgcagcgcgtcgtacaacgcttgctgttgagtattcatggcaacgctcggggtcggttttttctgcattatggggctcggctggcgtgctgacgtgcggaattcggacattaagttaagcacgccgcagccgcgcccgctaaatttttcgacactcgcgcattggcgcattgcccgccggcctcgtctcgggtaaagtcgccccccttcattggcatggggacaaaaaagagatgtttattggattcgattacgggaccgccaactgttccgttgcagtgatgcgcgaccacggccccgagctgttgacgctggaaaacaacgcgccctatctgccttcgatgctgtgcgcgccgacccgcgaagcggtgagcgaatgcctgcaccgccattggcagatcccaaccggcagcgaagaaaaccagcagttgctgcgccgcgccatcagttacaaccgcgaagaagacattccggtcaacggcgacagcgtgctgttcggcctgcaggcgctggcgcactacatggaagatccggaagaggtgtacttcgtgcgctcgccgaaatccttcctcggcgccaacggcctgaagccgcagcagatcgcgctgttcgaagacctggtgtgcgccatgatgttccacatcaaacgccaggcggaaaatgtgctgcagaccggcatcgatcaggcggtgatcggccggccgatcaacttccagggcatcggcggcgacgaagccaaccggcaggcgcagggcattttgcagcgcgccgccgaacgcgccggtttcaaggagattgaattccagttcgagccggtggcggcggggctggacttcgaggcaacgctgagcgaagagcaaaccgtgctggtggtggacatcggcggcggtaccaccgactgctcagtgctgctgatggggccgcagtggcgcgaccgcgccgatcgccagcagagcctgctgggccacagcggctgccgggttggcggtaacgatctggacatcatgctggccttcaaacagctgatgccgctgttcggcctcggcggcgaaaccgcgaagggcatcgccctgccggcgctgccttactggaacgcggtggcgaccaacgacgtgccggcgcaaaacgacttctacagcgccgccaacggccgcgtgctgcgcgatctgatcctcgacgcggcggagccggaaaaggtgaaacgcctgctgaaagtgtaccagcagcgcctgagctaccgactggtgcgggcggccgaagagagtaagatagccctgtccggccaaacggccatcagcgcgctgctcaatttcgtgcaggccgatctggcggagagcatcagccaggatcagctcgccgacgccatctcgcagccgttgatgcgcatccaggagcaggtcagcgccgcattggccagcagccagaccgcgccgcaggtgatctacctgaccggcggcagcgcgcgttcaccgctgctgcgcgccgcgctgcaacagcagctgccgggcattccgatcgtcggcggcaacgacttcggctcggtcaccgccgggctggcgcgctgggcgcaaacgctgttccgttgacggcccaagggcgcctcgccgcgcctttgtttattggaggccctatcatgtccaccttgcttaccctcgacagcgccaggctgcggctgcgcccctggcgtgacagcgatctgccggccttcgccgcgcttaacgccgatccgcaggtgatgcgctatttcccggcgctgatgacggccgaggaaagccgcgcgcaggccgaacgcatccgcgccttcatgcaacaacacggctgggggctgtgggcggtggaagtgaaaggcggcgcgccttttatcggctttgtcgggctggcgcggccgggcgatgatctgccctgctccccctgcgtggagattggctggcggctggcggcggctcactggggcaacggctacgccgctgaggcggcgcgcgccgcgctggcgtgcgccttcgacacgctgcacctgccggaagtggtgtccttcaccgccgaagataaccagccgtcgcgccgggtgatgacgcgcatcggtatgcgcttcgacggtgaaatcttcctgcacccgcgcctgccggcgggccatccgctgcaacagcacgtcttgtaccggcttaaccggcaaacgtggcgcgaacgccacggcgattaatacagcgtatccttcagccgctgcggcagcgcgctgtcgtactcctcaccgtcgaagcgcgtttggctcaccgcggccaagatttggccggggctgggcagcgccgaacgttcgaggcggcggccctcttcccacaaccccgaacgcaagatcgcccggctgcactggaagaacaccgcctccacccgaatgcgcagcaccgaacgcggcagctggttgcggtgggcgaagcgctgcaacaccgccggcgccaccacgatctccgcccgcccgttaatccgcagcgtttcgccgatgccggggatcagcaacagcagcgccacccggttatcgtgcaggatattgcgcaggctatcgatgcgattattgccgcgccggtccggcaacagcagggttttctcgtcttcgatctggataaaaccggccggatcgccgcgcggggagacatccatgccgtccggcccgaccgtcgagagggcggcaaacggcgccgcctcgataaacggacggtacgccgggtggatatagctgacttctttaaaaaccgagggcgcggcaggtttgccgtaaagctgttccagcgccgcgaggtcgttgatgatatcgccagacattgcagtttcctgaataagtcatattgaccccttcagcatagagcaaaatcgccggcggctcttactcagcgctggcgtggttcagcgtctgaatgtcgtccgcatccagcgtcaggcgggtggcgctgaccaactcatccagctgcggcaacgaggtggcgctgacgatcggcgcggtgatgctcggacgcgcaatcagccaggccagcgagacctgcgccggagagctgccgtgcttgcccgccacctgatccagcgccgccagaatgcggaaaccgcgcgggttcaggtagcgttcgacgatgcgatcgccgcgctggcttttgccctcgtccgctttgctgcggtatttgccggtcaggaagccgctggccagcgcaaagaagttgatcaccccgagaccatggcgctgcgccacgccttccagctcggcttcatacccttcgcgcgcatacagattgtattccggctgcagggtttcgtagcgcgccaatccgttgctttcgctcacccgcagcgcttcttccaggcgatccgcctgatagttggaggcgccgatcgcccgcaccttgccggccttgatcagcgcatcgaacgccgccagcgtctcttccagcggcgtatcgcggtcatcgtcgtgcgactggtagagatcgatataatcggtttgcagacggcgcagcgaatcttccaccgcctgctgaatatagcgcggcgacagcccctgtttgccttcgcccatcggtttgcccaccttggtggcgatgatcacctggtcgcgcttgccgctcttcttcagccattcgccgatgacggtttccgattcgccgccccggttgcccggcgcccagctggaataaacgtcggcggtatcgataaagttgagctgattgtccaccagcgcatccagcagattgaacgaggtcgcttgatccgccgtccagccgaacacgttgccgccaaaggtcaacgccggcacctgaatgcccgaacggcccagttgtttcttgctcatcacaaaggctccatgggttaaatgatttgcctgttaattattagcgccaaatgcaggaaatcgttaaaacggattggctataagccggaataaatcacttataaacatagcacgcgcaaatcacccacttattaagacaatgctgacggttcctccatatttccttcatttttatgccgtcttcgctggctaaactagtatcctgtaaggagtgtcatttttgtggcaatgagtgcccgcgcccctgccttttggagagaattttcaccaccatgaatgcaaaaccccaacgtcgttccctgctgctgcgcctgctggctgcggcgattgcgatcatcgtcgccgttctggcctggcgccatttcagcgcagcccaaccgaccgccgggacgacgccgggcgcgcaccaggccgccggtaaaacgggagcgggccgcgcggcgggtggcagacgcggcgcgccgatgtcgccggtgcaggcggcgacagccacgcaacaaaccgtgccgcgctatctttccggcttgggcaccgccaccgccgccaataccgtgaccgtcaccagccgggtcgatggccaactgatggcgatccactttaccgaaggccagcaggtcaaagccggcgatctgctggcggagatcgatccccggccgttccaggtgcagctgacccaggctcaggggcagttggcaaaagatcaggccacgctggccaacgcccggcgcgatctggcgcgctatcagcagttggtgaaaaccaatctggtttcccgtcaggagctggatacgcaggcctcgctggtgcaacaaaccgaaggcgccatcaaagccgatcagggcgcggtcgacagcgccaaactgcagatcacctacagccgcatcactgcgccaatcgacggccgcgtcgggttgaaactggtcgacgtcggcaactacgtcaccagcggcagcaccaccggtctggtggtgatcacgcagacgcacccgatcgacgtggtgttcacgctgcccgaaggcaacatcgccgatctgctcaaggcgcaaaaagccgggccggtgagcgtcgaagcctgggatcgcaccaaccagaacaagctgacgaccggttcgctgctgagcctggacaaccaaattgataccgccaccggcaccatcaagctgaaagcgcgtttcgccaacgaagatgacgcgctgttccccaaccagttcgtcaacgcgcggctgcaggtggataccctgcacgatgcggtggtgatcccgaccgccgcgctgcagatgggcaacgaaggcaacttcgtctggacgctcagcgaagacaacaaggtcagcaaacatcgggtcaccgccggcgtgcaggacagccggcaggtggtgatcagcgccggcctcaacgccggcgatcgggtggtgaccgacggcatagatcgcctgaccgaaggcatgcaggtggaagtgctcgcgccgagcgacgcgcctgcgacgtcaaaagccaagcgcgaacctgacgttcagaggaagtcctgatgcaggtgatgcctcccaacgccggcggcggtccgtcccgcctgtttattctgcgcccggtcgccaccacgctgctgatggtggcgatattgctggcggggattatcggctatcgcgcgctgccggtatccgccctgccggaagtggactaccccaccatccaggtggtgacgctataccccggcgccagcccggacgtggtcacctccgccattaccgcgccgctggaacgccagttcggccagatgtccggcctgaagcaaatggcgtcgcaaagcgccggcggcgcctcggtggtgacgctgcaattccagctgacgctgccgctcgacgtcgcggagcaggaagtgcaggcggcgatcaacgccgccaccaacctgctgccgaacgatctgccctacccgccgatttatagcaaggttaaccccgccgatccgccgatcctgacgctggcagtgacctccaccgccatgccgatgacgcaggtggaagacatggtggaaacccgcgtggcgcaaaaaatttctcaggtgaccggcgtcggcctggtgaccctggccggcggccaacgcccggcggtgcgtgtaaaattgaacgccgcggcggtcgccgcctatggcctgaacagcgaaaccatccgcgccgccatcagcaacgccaacgtcaactcggcgaaaggcagcctggacggcccgacccgctcggtcaccctgtccgccaacgaccaaatgaaatccgccgacgactatcgccagctgatcgtcgcctatcagaacggcgcggcgatccgcctgcaggatatcgccaccatcgaacaaggggcggaaaacacccggctggcggcctgggccaaccagcagcaggcgatcgtgctgaacatccaacgccagcccggcgtcaacgtcatcaccaccgccgacagcatccgcgaaatgctgccgacgctgattaaaagcctgcccaagtcggtcgatgtcaaggtgctgaccgatcgcaccaccaccatccgcgcctcggtcagcgacgtgcagttcgagctgctgctggcagtcgcgctggtggtgatggtgatctacgtgttcctgcgcaacgtgccggcgaccattatccccagcgtggcggtgccgctttcgctggtgggcaccttcgccgccatgtacttcctcggcttctccatcaacaacctgacgctgatggcattaaccatcgccaccggtttcgtggtggatgacgccatcgtggtgatcgagaacatctcgcgctacatcgagaaaggggaaaaaccgctcgacgccgcgttgaaaggggccggcgagatcggcttcaccatcatctcgctgaccttctcgctggtggcggtgctgatcccgctgctgttcatgggcgacatcgtcggccgcctgttccgcgagttcgccgtcacgctggcggtagcgattttgatctccgccgtggtgtcgctgacgctgacgccgatgatgtgcgcgcgcatgctcagccacgaatcgctgcgcaagcagaaccgtttttccgccgcctccgaacgctttttcgagcgggtgatcgcgcgctacggccagtggctgaaaacggtgcttaaccatccctggctgacgctcggcgtggccgtgggcaccctggcgctgacggtgctgctgtacctgctgatcccgaaaggcttcttcccggtgcaggacaacggcatcattcagggcacgctggaggcgccgcagagcgtttcgttcagcaacatggccgagcgccagcagcaggtcgcggcgcagatcctcaaggatccggcggtggaaagcctgacctcgttcgtcggcgtcgacggcagcaacgccacgctcaacagcggccggctgcagatcaacctgaaaccgctgagcgaacgcagcgaccgcattccggcgatcatcagccgcctgcagcagcaaacggcgcagttccccggcgtgaagctgtacctgcagccggtgcaggatctgaccatcgatacccaggtcagccgcacccagtaccagttcaccctgcaggcgatgtcgctggacgatctcagcctgtgggtgccgcagctgatggatgagctgaaacaaaccccgcagctggcggacgtcaccagcgactggcaggatcaggggctggtggcctacgtcaacgtcgatcgcgattcggcctcccgtctcggcgtcaccatgagcgacgtggacaatgcgctgtacaacgcgttcggccaacgcctgatctccaccatctacacccaggccaaccaataccgcgtggtgctggagcacgacgtcagcgcgacaccggggctggcggcgctcaatgagatccgtctgagcggcaacgacggcgccgtagtgccgctgagcgccatcgccaaaatcgaagagcgcttcggcccgctgtcggtcaaccatctcgatcagttcccgtcggccaccgtttcgttcaacgtcgccgacggctactcgctcggcgaagcggtggacgcggtcacccaggcggaaaaaaatctcaacatgccaagggacatcaccacccaattccagggggcgaccctggccttccaggcggcgctcggcagcacgctgtggctgattttggcggcggtagtggcgatgtacatcgtgctgggcgtgctgtatgaaagtttcattcacccggtgaccatcctctccaccctgccgaccgccggggtcggcgcactgctcgcgctgatgatggccggcagcgagctggacgtgatcgccatcatcggcatcatcctgctgatcggcatcgtgaagaagaacgccatcatgatgatcgacttcgcgctggcggcggaacgcgagcagggcttatcgccgcgcgacgccatctatcaggcctgcctgctgcgttttaggccgatcctgatgaccacgctggcggccctgctcggcgcgctgccgctgatgctgagcaccggcgtcggcgcggagctgcggcatccgctcggcgtctgtatggtcggcggtttgatcatgagccagatcctgacgctgttcaccacgccggtgatctacctgctgtttgacaaactggcgcgcaacacgcatcgccagccggatacgcaggagctgccgtgaaattcttcgccctgttcattcaccggccggtggccaccaccctgctgacgctggccatcgccatcagcggcgcgatcggctttcgcctgctgccggtgtcgccgctgccgcaggtggattttccggtgatttcgatcagcgcgtcgctgccgggcgcctcgccggaaaccatggcgtcctcggtggcaacgccgctggagcgcgcgctgggccgcatcgccggggttaacgaaatgacctcgatgagctcgctcggcagtacccgggtcattttgcagttcgatctcgatcgcgatatcaacggcgccgcgcgcgacgtgcaggcggcgattaacgccgcgcaaagcctgctgccgaccggcatgccgagccgccccagctaccgcaaggtcaacccatccgacgcgccgatcatgatcctgacgctgacctcggacacctacagtcaggggcagctttacgatttcgcctccacccagctggcgcagaagatcagccagaccgagggcgtcggcgacgtttccgtcggcggcagctcgctgccggcggtgcgggtggagctgaacccttcggcgctgttcaatcagggcgtgtcgctggacaccgtacggcaggccatcgccaacgccaacgtgcgccgcccgcagggcgccgtggaaaacccgcagcagcgctggcagatccaggccaacgacgcgctgaaaaccgccgatgcttatcgtccgctgatcattcattacaacaacggttcggcggtgcgtttagccgacgtggccgaggtcaaagactcggtgcaagacgtgcgcaacgccgggatgaccgacgccaaaccggcgatcattctggccatcagccgcgcgccggacgccaacatcatcgaaaccgtcgatcgcattcgcgccgaactgcccgccctgcaggagaatatcccggcttcgattcaactcaacgtcgcgcaggatcgttcgccgaccatccgcgcgtcgctggccgaggtggagcagtcgctggcgatcgccatcgggctggtgatcctggtggtgttcatcttcctgcgctccgggcgcgccacgctgatcccggctgtcgccgtaccggtgtcgctgatcggctcgttcgccgccatgtatctgtgcgggttcagcctcaacaacctgtcgctgatggcgttgaccatcgccaccggttttgtggtggacgacgccatcgtggtgctggaaaacatttcccgccacgtcgaggccggcatgaaaccgatcaacgccgcgctgctgggcgcgcgggaggtcggtttcaccgtgctgtcgatgagcgtttcgctggtggcggtgtttatcccgctgctgctgatggaaggcctgcccggccggctattccgcgagttcgccgtcactctgtcggtgtcgatcgggctgtcgctgatcgtctcgctgacgctcacgccgatgatgtgcgcctacctgctgcgccaccagccgccgcgttcgcagcggcgggcgcgcggcttcggtaaaatgctgctggggctgcagcagggctacgggcgctcgctgaactgggtgctcggccactcgcgctgggtgctggcggtgttcctcgccaccgttgcgctcaacgtttggctgtatatcagcatcccgaaaaccttcttcccggaacaggataccgggcgtctgatgggctttatccaggccgaccaaagcatttcgttccaggcgatgcgcggcaaactggaagacttcatgaaaatcgtgcgcgaagatccggacgtggaaaacgtcaccggttttaccggcggttcgcgcaccaacagcggttcgatgttcatctcactgaaaccgctgtcggtacgcagcgacgacgcgcagaaagtgatcgcccgcctgcgcgcccgcctggccaaagaaccgggcgccagcctgtttctgatggcggtgcaggatatccgcgtcggcggccggcaggccaacgccagctatcaatatacgctgctggcggacgatctcgccgcgctgcgcgaatgggagccgaagatccgcaccgcactggccgcattgcccgagctggcggacgtcaactcggatcagcaggataaaggctcggagatggatctggtctacgatcgtgaaaccatggcgcgcctcggcatttcggtgtccgacgccaacaacctgttgaacaacgccttcggccagcgacagatttcgaccatctaccaaccgctcaaccaatacaaagtcgtgatggaagtggcgccgccctacacccaggacgtgagttcgctggacaaaatgttcatcatcaacaacgaaggcaaagcgataccgctctcctacttcgccagttggcggccggccaacgcgccgctgtcggtcaaccatcaggggctgtccgccgcctcgaccgtctcctttaacctgccggacggcggcagcctgtcggacgccaccgcggcggtcgagcgcaccatgactcagctcggcgtgccgtctacggtgcgcggcgcgttcgccggcaccgcccaggtgttccaggacaccctgaagtcgcagctgatcctgatcctggcggcgatcgccacggtgtacatcgtgctcggcgtgctatatgagagctatatccatccgctgaccatcctttccacgctgccttccgccggcgtgggggcgctgctggcgctcgagctgttcggcgcgccgttcagcctgatcgcgctgatcggcatcatgctgttgatcggcatcgtgaagaaaaacgccatcatgatggtcgacttcgcgctcgaggcgcagcgcaacggcggcatcagcgcccgcgaggcgattttccaggccagcctgctgcgtttccggccgatcatgatgaccacgctggcggcgttgttcggcgcgctgccgctggtgctgacccgcggcgacggcgcggagctgcgccagccgctcggcatcaccatcgccggcggcctggtgatgagccaactgctgacgctgtacaccaccccggtggtctacctttacttcgaccggctgcaggcgaagttccgccgcaacaagcaactggccccgctgccccattaatggccgaccgatgctgatgaaacacaccgccacggtacgctggcaactctggatagtggcattcggcttctttatgcagacgctggataccactatcgtcaacaccgccctgccctcgatggccgccagcctgggggagaacccgctgcgcatgcagtcggtgatcgtctcctatgtgctgacggtggcagtgacgctgccggccagcggctggctggcggacaagatcggcgtacagcgggtgtttttcagcgccatcgtgctgtttaccctcggctccctcctctgcgcccgctcggaaaccctgaacgagctgatcgcctcgcgcgtgattcagggcgtcggcggcgcgatgatggtgccggtcgggcgcctgacggtgatgaagatcgtgccgcgcgagcagtacatggcggcgatgactttcgtgacgctgccaggccagatcggcccgctgatggggccggcgctgggcggtttcctggtgcaatacgccagttggcactggattttcctgatcaatattccggtgggcatcgtgggcgccatcgccacgctgctgctgatgcccaactaccaaatgcagacccgccgcttcgatctcagcggctttatcctgctggcgatcggcatggcgtcgctgacgctggcgctcgacggccataaaggcatggggctgtccggcggcgccatcgccggtctggtggcgctgggcgcagcggcgctgttggggtatgtttggcatgcctacggcaatagccgcgccctgttctcgctgcggctgctgcgcaccccgacctacaaaatcgggctgctggccagcctgctggggcgcatcggcagcggcatgctgccgttcatgacgccgctgttcctgcaggtgggcatgggtttcacgccgttccacgccgggctgatgatgatcccgatgatcatcggcagcatgggcatgaaacgcatcgtggtgcaggtagtcaaccgcttcggctaccgcaacgtgctggtggccgccacgctgctgctggcgctggtcagcctgagcttcctgctggcggcgatgctcggctggctgtggctgctgccggtggtgctgttcttccaggggatgatcaactcactgcgcttctcggcgatgaacaccctgacgctgaaagatctgccggaccggctggccagcagcggcaacagtctgctgtcgatggtcatgcagctgtcgatgagcctcggcgtcagcgtcgccggcatcttgatcggcagcttcgcccatcaccaggtggtggccgatagcccggccatccacagcgcatttatttacagctacggctgtatggcgttgattatcgctctgcccgcgcttgccttcgcgcgcgtgccggccgatagcgcgcccaaccgcacgctgaccaaagagccgggtaccggctcaacgaggttgcaatgaggataggcattaccggaaaactgttcctggccattttcgctacctgcatgctggtgttgatcaccatgcattggggggtgcgcgtcagctttgagcgcggctttatcgattacatcaagagcagcaacgagcagcgcatcaacatgctgagcgaagcgctggaggaacagtacagccatcatggcaactggatattcctgcgcaacaacgatcaggtggtctaccagatcatgcgttcgttcgagcagaatagcgacagcagccacaatctgccgcccaaggggtggcgcacccagttttgggtggtggacagccagttcaatcgcttggtcgggcattcgggccccttgccgaaggaggggccgcgccacccgatccgctacaacaacgagatcgtcggctgggtgctcaccaccccggtcgagcgcctgacgcgcaataccgacatcaacttcgatcgccagcagcggcgcaccagctggattatcgtcgcgctctccaccctgttggcggcggcggtgacctggctgctgtcgcgcggcatgctggccccggtcaagcgcctggtggcgggcacccaccgcctggcggcgggcgatttcaccacccgcgtggcggtcagcagccaggatgaactgggcaggctggcgcacgacttcaaccagttggccacctcgctggaaaaaaacgagcagatgcgccgcgcctttatggccgacgtatcgcacgagctgcgcacgccgctggcagtgctgcgcggcgaactggaggcgctgcaggacggcgtgcgccagccgacgccggcgtcgctcagttcgctgcaggccgaggtatccaccctgaccaaactggtcgacgacctgcaccagctgtcgctctccgatctcggcgcgctggcctatcgcaaggcgtcggtggactgcgtgcacctggtgcagatcgccgtcgccgcctttcgcgaacgcttccgcgccaaagggctggagatcgtcacccatctgccggcccaggcgccgctgttcggcgatcccgatcgcctgaaccaactgttcaataacctgctggaaaacagcctgcgttacaccgacgccggcggccggttggagatcggcgtcgaactgcagccggggcggctgcttctttactggcaggacagcgcgccgggcatcagcgatcagcaactgacgcgcattttcgaacgtttctaccgggcggaaggttcacgcaaccgcgccagcggcggttccgggctggggttggcgatctgccacaacatcgtggaagcgcacgacgggaaaatccgcgccgagcattcgcctttaggcggcgtgcgcattacagtagaatttgctaccccgataaaaaataaggcgccctgatggacattcagaatcaacccctgcagatcatgattgttgaagatgagcccaagctgggccagctgctggtggattatctccaggcggcgggctacgccacccgctggctgaccaacggcaatgaggtggtgccgaccgtgcaccagcatccgccggcgctgatcttgctcgacctgatgttgccgggggccgacggcctgacggtgtgccgcgagctgcgccgcttcagcgacgtgcccatcgtgatggtgacggcgaaaattgaagagattgaccgcctgttggggctggagatcggcgccgacgattacatctgcaaaccctacagcccgcgcgaagtggtggcgcgggtgaaaaccatcctgcgccgcagctatcggccgcaggagaacgcgcgggaagatgacctgctgcacatcgatgaaccgcgcttccaggccagctatcaggggcagttgctggatctgacgccggcggagttccgcctgctgaaaacgctggccagccagccgggcaacgtgttttcacgcgagcagctgctgaacaacctgtacgacgactaccgggtggtcaccgaccgcaccatcgacagccacatcaaaaacctgcgccgcaagctggaactgatcgatggggaaaaatcctttatccgctcggtatacggcgtgggctaccgctgggaagccgagccttgccggctgatgaatggggtttagggggaaatcagcgcgtccagtcttcaaccgccaacccgggcaccatggcgaatgcgcgatcgttggtcaccagcgtcgcgccacggctctgcgcgtgagcggcgatcagttgatccatcgcgcccatgattttgccctttctctccatgtttgcccgcatttcaccgtagcagcgggcggcctcgctatcccatgcatagaccgtcaccgcagcaagaaaggcctcgaccatgctttgcaacgccttgttccgccgtttagccacaccgtaacgcagttccgcctccgtgacgctggaaatacatacggcataaggcgggagcttttccatgacgttaagcacctgcggatgctgccgaaacaagtggctgacggtgttggtatcaaacatgtacatcgcctactcttcctctgagaagggatcgcggtcggcaaccccttgctgacgatcttccgcgccaagaaactcttgcggcaccggcgtttgggcgataatgctcagcagcggtgcccagctgtccggctttgccggatatttggataaaatcacgttgccctcccgatcgcgacggatatagacacgatccgtatcaaattcaaattccaccggtaacctcaccgcctgatttctgccgtttttaaacagctttgcgatcctttccatctcgacacctccacagcaggcataggccaaagcatatgcctgtagcgtgtcgatgccaagatgtatcgctcatttttcatccacattgacgaaacggccaaacagtaacgcacaatctcacggggtgacaccctgttcccctcgttatgcggcgcactgcgcaatcacgccttctcccttagcttcccgtgcggcgctgtgcctctcgggcgaaaactccgcgccggcgcaaaaaaactgcgcattttttcaactaagctgctgtgaggtttagccgccgattttcaagcgattggctacacttacatcacgaatcggaacctacaggagaagaaccatggcaatcggtcattacgagctgaaaaaagcaaagaacggacagtaccacttcaacctgaaagccagtaacggcgagatcattctggccagcgagatgtatgccagcaaagcctcggcagagaatggcatcgcctcggtgcagaccaattcaccgcacgaagcgcagtacgaactgaagcacagcgccagcaatcagccctactttgtgctgaaggccaagaaccatcaggtgatcggcgtcagcgaaatgtacagctccgaaagcgcggccaaaaacggtatccagtcggtgataaaaaacggcccgaccaccgatatccgcgatttgagcgcctgatcccccgtttcacccgcgcggtggcggccaccgcgcgttttccgtttgaccgggatcaatctcccttgaataaatccggttaactgctgatttcttgccgcgctgcggctacaatcccccgcttttactgcgccatcaggtggcgtggtgctgacctgaaatcagaccgagacacactatgtttacaccagaacttctctccccggccggcacgctgaaaaatatgcgttacgccttcgcctacggcgccgatgcggtttacgccggccagccgcgctacagcctgcgggtgcgcaacaacgagttcaaccacgagaatctggcgcagggtatcaacgaagcgcatgcgctgggcaaaaagttctacgtggtggtgaacatcgccccgcacaacgccaagttgaaaaccttcctgcgcgatctgaagccggttatcgatatgggcccggatgcgctgatcatgtccgatcccggccttatcatgatggtgcgcgaagccttcccgcagatggacatccacctgtcggtgcaggccaacgccgttaactgggcgacggtgaagttctggaagcaaatgggcctgacccgcgtgatcctgtcgcgtgaactgtcgctggaagagatcgccgagatccgcgccgaagtgccggacatggagctggagatcttcgtccacggcgcgctgtgcatggcctactccggccgctgcctgctgtccggctacatcaacaagcgcgaccccaatcagggcacctgcaccaatgcctgccgctggcagtacaaagcggaggaaggcaaagaggacgacaccggcaatatcgtgcacctgcacgagccgatcccggtgcaaaccgtcgagccgacgctgggcatcggcgcgccgaccgacaaggtgttcatgctgtctgaagcgcaaaagccaggcgaatatatgagcgccttcgaggacgaacacggcacctatatcatgaactccaaggatctgcgcgccatccagcacgtggagcgtctgacgcagctcggcgtgcattcgctgaagatcgaagggcgcaccaagtcgttctactactgcgcccgcaccgctcaggtctatcgccgcgccatcgacgacgcggccgccggcaaaccgttcgatccgaccctgctcaccacgctggaaggcctggcgcaccgcggctataccgaaggcttcctgcgccgccacgtgcacgaagcgcagcagaattacgactacggctcctcgctctccgagcgccagcagttcgtcggcgaattcaccggcgtgcgccgtgatggctgggcggaagtcgacgtgaagaataagttcgcgctcggcgacagcgtcgaaatgatgacgccgggcggcaacgtggtgttcaccctcgagagcatgcaaaataagaaaggcgaatcgattgaggtggcgccgggcaacggccatatcgtttatttgccgatcccgcaggatatcgatctcaattatgcgttgctgatccgcaatttggcggaagaaaatagcgccggggcataaaaatgaatcgccgtcattcggcggcgatttttagcaaatattagaattggatcacatcaatgcgcgcgcagcttggttactatcacgctgcttaaaacgaacaacgaaaatatttgcatagcaatactaggaaccacctccttagccggcccaatctcccttgggctggctttttctttatgggtgcgcctatttttttccaccatgcctatttccataacttattcccgttatccgttttaataataataatcacgccgcttcgatatataaataacgctacagcgattaatcctcgcttctttaacacttcgcttatttctgcgtaaaattcagataaattcgccttgcttcatattcactgagcgtcggcaaataaccggaattagctgaatattctgatggcctggtggcggcagctggtttatcttgaggcattcttggttttccgccggaggatatcggcaatgcctcaacactcacatgcgtccgccctgcttatcatcaacggcaaaggcgccggtaacgaagagctgcgtcaggcggtcaaccggctgcgcaaagaacagataacgctgcacgtgcgcgtcacctgggagcacggcgatgccgcgcgctatgtcgcggaagccgcgcagctcggcgtcggcaccgtcgtcgccggcggcggtgacggcaccatcaacgaagtggccgccgcgctggtgcagctgccggcgcacaaccggccggcgctgggcatcctgccgctcggcaccgccaacgacttcgccatggcgtgcaatatccctccgtcccccgaactggcgctgcagctggcgatcaagggccgttcagtgccgatcgatctggcgaaggtcaacggcgagcgctatttcatcaacatggccaccggcggcttcggcacccgcatcaccaccgaaacgccggagaagctgaaagcggcgctgggcggcgtgtcctactttgtgcacggcctgctgcgcatggatacgctgcaggccgaccgctgtgaaatccgcgggccggactttcgctgggccggcgaggcgctggtgatcggcatcggcaacggcaaacaggccggcggcggccaggaactgtgccccagcgcgctgatcaacgacggcctgctgcagctgcgcctgctgatcgccgatgaactgctgccggcgctggtcgccgccctgttcaacgacgaagagagcaacagcatcctcagcgcggcgctgccgtggctcgagatcgacgcgccgcatgagatgactttcaacctcgacggcgaaccgctcaaaggccgccatttccgcatcgaagtgttgccgcaggccatcgaatgccgcctgccgcctaactgcgccctgctgggctgaccttgtcgggcgcagccactgcgccccgcttcttcccctctgttcacccgcttccgcgcacgatcaaatgtgatcctctccggcaaattcattaattcatacttgtatggtagttagttcatggcgtattttcgcgctatctctccgcagctacaggatgtgaaggttatgaaaatcgtcaacgccgaggtgttcgtcacctgcccggggcgcaactttgtcacgctgaaaatcaccaccgatgacggcatcatcggcctcggtgacgccacgctgaacgggcgcgaattgccggtggcctcttacctgaaagatcacctctgcccgcagttgatcggccgcgacgcgcagcggatcgaggacctctggcaattcttctacaaaggcgcttactggcggcgcggcccggtgaccatgtccgccatttccgccgtcgacatggcgctgtgggacatcaaggccaaggccgccaacatgccgctgtatcagctgttgggcggtgcctcgcgctcgggagtgatggtgtattgccataccaccggccactcgatcgatgaggtgctcgacgactacgccaaacataaagagcaaggcttcaaggcgatccgcgttcaatgcggcgtgccgggcatgaaaaccacctacggcatggccaagggcaaaggccaggcctatgagccggccaccaagggcgactggccggaagagcagctgtggtcgacggaaaaatacctcgacttcacccccaaattgttcgacgcggtgcgcaacaagttcggcttcaacgaacacctgctgcacgacatgcaccaccgcctgacgccaattgaagcggcgcgcttcggtaaaagcgccgaaccgtatcgcctgttctggatggaagatccgacgccggcggaaaatcaggcctgtttccgcctgatccgccagcataccgtcacgccgatcgctgtcggcgaggtgttcaacagcatctgggactgcaaacagctgatcgaagaacagctgatcgactacatccgcaccaccctgacgcacgcgggcggcattaccggcatgcggcgcatcgccgacttcgcctcgctgtatcaggtgcgcaccggttcacacggcccttccgatctgtcgccgatctgcatggcggcggcgctgcacttcgatctgtgggtgccgaacttcggcgtgcaggaatacatgggctattccgagcaaatgctcgaggtgttcccgcacagctggacgttcgacgacggctatatgcatccgggcgacaagccgggcatcggcatcgagttcgatgagaagctggcggcccgttacccctatgaaccggcctacctgccggtcgcgcgtctggaggatggcaccttatggaactggtaaacaccatgcgcagcgtcgtgatcgaacagcccgggcgcctggcgctacagacccgcgcactgccgcagccgacggccggcgaggtgcgggtcaaggtgaaattcgccggcatctgcggctccgacgtccatatctatcacggccataacccgttcgcccgctatccgcgtgtgatcggccacgagttcttcggcctgatcgatgcgctgggcgaaggcgtcgatccggcgcgcctcggcgaacgcgtctcagtagacccggtggtgagctgcggccactgctatccctgttcggtcggccgccccaacgtctgcacctcgctgcaggtgatcggcgtgcaccgcgacggcggcttcagcgactatgcctgcgtgccggcgcgcaacgcctatccggttccgccggccatcagcgatcgccacgccgcgatgatcgaacccttcagcatcgccgccaacattaccgcccatctgcaaccgcgccccgacgatatcgcgctaatctacggcgccgggccgatggggctcacggtgatccagacgctgaaaggggtgtacggcgtcaggcaggtgtgggtcgtcgatcgcatcgccgagcggctggagatggcgcgcgccaacggcgccgaccaaacattcaacaacgccgaggccgcattgccgcaggcgctgcagcagcgcggcgttcaaccgacgctgatcgtcgatgccgcctgccaccccgccattttaccggaggcgatcgcgctggcttcgccggcggcacgcatcggcatcatgggcttttccggcgacgcctgcaccctgacccagcagagcatcaccagcaaggagctgtcgatcttctcctcgcgcctgaacagcgcgcgctttccgcaggtgatcgcctggatggcggacggcaagctagacccgcagcggctgctcactcactgcgtgcccgccgacgacgtcgaacgggcgatgcagatgttcgagcgggatcagcgcacctgctgcaaggtgctgctgcagtttgagtaacgccaaggcggcatcggggcatgggcggcgcccgccgcccatgcaaacaatgaagcatcacgattaaaacgacacccagtggagcgctttatgtttaaaaacctgcgttggaccatcgtgttcctgctgttcatggtctacatgatcaactacctcgaccgcgtggcgctgtcgatcaccgtgccgatgatcgaacaggatctgatgctgaacgccgaacagttcggtctgatcttcggcagcttcttcttcggctacgccattttcaacttcgtcggcgggctggcggtcgaccgcttcggcccgacgctggtgctgggcgtggcggtcggcctgtggtccatcttctgcggcatgacggcgatcgccaccggtttttactcaatgctgatcctgcgcgtcctgttcggcatggccgaagggccgatctgcgcctcggccaacaagatgatcaacggctggttcccgaagaaacaggcggcgaccgccgtgggcctgctcagcgccggttcgccgttgggcggcgcggtggccgggccgatcgtcggctatctggcgctggcgttcggctggcggccggcgtttatgattatctgcgccatcggcatcgtctggatgctggtgtggttcttcgtggtggcggataacccggcgaaaagccaacgcgtcagcaacgaagaacgggcgctgatcgcacggttgaaacaggaaaatctcggcgaggaaagcgccttgagcgacgccccgcacgggctgggctactacctgaagcagccgatcattctggtcaccgccttcgccttcttctgctacaactacatcctgttcttcttcctgagctggttcccctcgtatctggtgcaggcacacaacctgaacatcaaagagatgagcctgaccacgatgatcccgtggatcgtcggcttcgtcgggctggcgctcggcggctatatttccgacaagatcttcaacatcaccggcaaattgctgctgtcgcgcaagatcgtgctggtcaccagcctgctggcggcggcggtgtgcgtggcgttggcgggcaccgtcagcagcgtggtgccggcggtgatgctgatgtcggtgtcgatcttcttcctctacattaccggcgctctctactgggcgatcatccaggacgtggtgcataaatcccgggtcggcggcgccagcgggttcattcatttgatcggcagcgtctccggcatcatcgggccgatcgccaccggctacatcgtgcagaacaccggcaagttcgacagcgcctttatgctggcgggcggcgtcgccgcgctgggcgcgctgctggtgctgctggtgatcaaggcgccgcgcgcaacggcgggcgtgcaaatcttaaaaccctaacgccagacggggcggcttcgcccctttgcttacctctccagggacattgaacatgagactttccgaccacagcgcgctgccggccgccgttatccggcccggctacgcacgtgagcgcgtgaaaccgcgcatggcgcatatcggcttcggcgcgtttcaccgcgcgcaccaggcgatgtacgccgacaggctggccagcgagcacggcagtgactggggctactgcgaaatcagcatgcagcacggccggcaaaagatcgccgatctacggcaacaggacctgctgttctcggtggcggagatggacgacgacggttggcggggccgggtcatcggcgtggtgcgccaggcgctgcacctgcaaaccgacgggttggcggcggtgctggcggccctgacgcagcccgagatcgccatcgtctcgctgagcatcagcgaaaagggctattgccaccaccccgccagcggccgactgatggcggaacacccggcgatcacgcatgatatcgcccacccggcacagccgcagtcggcgccggggctgctgctggcggcgctgcgcctgcgccgtgaacgcgggctgccgccgttcgccgtgatgtcctgcgataacatgccggccaacggccgggtcacgcgccaggtgctggtcgaactggcgcagcggcaggatccggcgctggccgactgggtgcgtcaagaggtcgccttcccttccaccatggtggatcgcatcgtgccggcggtaacgccggaggcccgccggcagttgcgcacctggctgggcggcgtcgaagatgaggtcggcgtagcctgcgagccgttcagccagtgggtcattgaagatcgatttccccaagggcgcccggcctgggacaaggtcggcgccgaactggtgagcgacgtgctgccgtacgaggagatgaagctgcgcatgctgaacggcagccattcgtttctcgcctacctcggctacctagccggttatcagcacatcggcgactgcatgcaggatgcggattttgtccgcgccgcccgtcacctgatgctggcggaacaggcgccgaccctgcaggtgccgaacgtcgatttggcgcagtatgccgactcgctgctgcaacgttaccgcaatcgcgcgttgaaacaccgcaccgcgcagatcgccatggacggcacgcagaagctgccgcaacggctgctggacgcgatccgctggcatctggcgcgcggcagccgcttcgactgcctggcgctgggcgtcgccggctggatgcgctacgtcggcggccgcgatgaacaaggcgagccgatcgccatcagcgatccgctgcgcgagcgcctcgccgcgttggtcgccggcagcgaggaaggccggccccgcgtcctggcgctgctgcaactcgacagcgtcttcggccgcgatctgcccgattcgcctgacttcgtccacgccgtcagccacgcttatcaccaactgctgagcctgggggccaaagccgccgtcgccgctctgccgcttaccgaccgggaggtttccgatgaccgtcaccacgcataacgccgtcaataccggcaatcaaccgctgctgcggcgcgtcgccagcgcgtcggccatcggcaccgccgccgaatactatgatttcttcgcctacggcaccgccgcggtgctgttcttcgaccagctgtttttccccagcgccgatccgctgatcagcacgctggcggccttcgccacctacgcggtcggtttcctggcgcgcccgctgggcggcatcgtgttcggccatatcggcgacaaagtcggccgcaagaaagcgctggtgatcaccatcctgatcgtcggcctcggcaccttttgcatcggcctgctgcctacctatgagcagatcggcatctgggcgccgatcgcgctgatctttatccgcgtgctgcagggcttcggcgtcggcggcgaacaggccggcgcggtgctgatgaccgccgaatacgcgccgccgccgcggcgcggtttctacgccagctgggtgcagatcggcgcgccggccggtttcctgctgccgtccgggctgttcgcgctgctgaccgccgtgctgtcgccggcgcagatgctggactggggctggcgcattccgttcctgctcagcctgctgctggtgctggtcgggctgtttattcgcctgaagatcgacgagtcgccggtgtttacccaaatccgcgccaccaaagcggtggagagccggccggtggtggaagtggcccgccgctatcccggccttatcgccaaaggggtgtgcgccaagctgatcgaagcctgcgccttcgccatgttcaccgtgatcgtgctggcctacggcaaggccaaccacctcaacgaaagcattttgctggaggcgatgatcgtggcggtgctgctggagattttcgccattccgctgatgggccgcctctccgatcggctggggcgcaaaccggtttacatcgccggcgcgctgctgcaggtggtgtgcatcgtgccgttctttatggcgatcaacctcgataatttctgggtgacgcagatcgccatgatcgtggtgctgaccttcggccacagcatgtgctacgcgccgcaggcctcctacttcccggagctgttccccacccgcgtgcgctgcagcggcatcgcgctgatctggcagatcggctcgctgatcggcagcggcattctcgggctgctggcggtgaagatcctgcaggtgaccggcggccattactacgggctggccggttacatgatggtgctgggcgtggtgtcggccctcggcctgagcctgatgccggaaaccgcgccagagcggcgcaagcaggaatatcaggattggcatcactgagttcccctgcctggcgggtggatttatccccccgccctcaaccaataatctgctagtatggtggcattcgaactccagccagatgcctgattgtcgccatgtctgaaacgtacagtctcaccaacaacgtcccggtcaaccagcagatctatcgctttctgcgcaaagatatcgtcgattgcaccatcccccccggcaccctgctgtccgagaaagagatctccacccgcttcaacgtttcgcgccagccggtgcgcgaagccttcatcaagctggcggaggccggcctggtgcagatcctgccgcagcgcggcaccttcgtgatgaagatttccgccaaacgcgtggccgacgggcgctttatccgtcaggcggtggaatgcgccatcgtgcgccgcgcggccgagcgcgccactccggcgcagctgatgacgctggagcataacctgcaccgtcaagagctggcggcgcagaacgggcaaacgcgcgaatttttggcgctggacgacgagttccaccagctgctgaccctgtttgccgactgcccgctggcgtgggagaccatcgaaaccatcaaggccaccatggatcgggtgcgtttcctcagcctgagcgaagtctcgccgccggagagcctgatcaagcagcactaccgcatctacgaagcgctgaaagcgcgcgatgccgaggcggcggagcgcgccatccacgatcatctgcaggagatgatctactccatcaccccgatcgcccaacagaataccgcgtggttcgagatcgaataatcaatcgcttagcgcgccgggggcgatcgcccccgcgtatttggccacgcaaatggcatttcctctcaatcgcatctattgtttgtccttgccggagcaagttcggtagcatcgctttacagcttcaatcaccgctttttactgcgccggtggtcaaaaacccttgcattgccggtgtatgaagaagcttaatcgggagtgaatcatgactgatattgtgcagttgctaggaaaggaagcggaagatctgctgcaacaccgctgtaccactatccccgccgagaatctctacctgccgggcgccgacttcgtcgaccgtgtaatgatcgataacaaccgccccaacagcgtgctgcgttcgatgcaaaccctgttcaaccacggccgcctgggcggcaccggttatctgtctatcctgccggtcgaccagggcatcgagcactccgccgccgcctcgttcgccgccaacccgctgtatttcgatccgaagaacatcgtcgagctggcgattgaagccggctgtaactgcgtcgcctccacctacggcgtgctggcgtcggtatcgcgccgctatgcgcataaaattccgttcctggtcaaactcaaccacaacgaaacgctgagctatccgacccagtacgaccagaccctgtacgccagcgtcgagcaggcgttcaacatgggggcagtggcggtcggcgccaccatttactttggttcagagcagtcgcgccgccagatcgaagagatctctatcgcctttgagcgcgcgcatgaactgggcatggtcaccgtgctgtgggcctatctgcgcaacccggcgttcaacaaagacggcgtggactaccactccagcgccgatctgaccggccaggccaaccacatcgccgccaccatcggcgccgacatcgtcaaacagaaaatggcggaaaacaacggcggctaccgcgcggtgaaattcggctataccgacgaccgcgtctacaccaagctgaccaccgatcacccgatcgatctggtgcgctaccagctggccaactgctacatgggccgcgccgggctgatcaactccggcggcgccgccggtgagaacgatctgcaggaatcggtgcgcaccgcggtgatcaacaaacgcgccggcggcatgggcctgatcctggggcgtaaagccttcaagaaatcgatgaaagacggcgtggcgctgatcaacgccgtgcaagatgcctatctggacaagaaggtcaccatcgcctgatgtgacggaccgcctgtcccaaagcccggttcgccgggcttttttgtgcccgttcccctaaacccgacaccgctaatcttctctttctttcactttaaactttcaaaataaaatatttatctttcaaattgtgatctatttaaaacaaatagcccaacaaagtgactactgtaaggcccatggcgatagagccgccgttcgctccaggccataacagtccattacaggagaacataatgattgagctaatcacccacggcgccgagtggtttatcggcctgtttcagaaaggcggtgaagtgtttgtcggcatggtgaccggcattttgcctttgttgatcagcctgttggttatcatgaacgcgctgatcaaatttgttggccaggaacgtatcgaacgattggcgcagcgctgcgcgggcaaccccgtttcgcgttatctgctgctgccgctgatcggcacctttgtcttctgcaacccgatgaccctcagcctggggcgcttcatgccggagaaatacaagccgagctactacgcggcggcctcctacagctgccactcgatgaacggcctgtttccacatatcaaccccggcgagctgttcgtttacctcggcatcgccagcggcctgaccaccctcggcctgccgctcggcccgctggcagtgagctatttcctggtggggctgttcaccaacttcttccgcggctgggtcaccgatctgactaccagcctgttcgaacgcaagatgggcatccgtctggatcgccaggtgcaactttaattcgtggagtgcagcatgagtgcttatatccgtattgaaaaaggcgccagcggctggggcggccctttggaactgccgatcgaacccggcaaaaaagtggtgtacatcaccgccggcacccggccttccatcgtcgatcgcctcagcgaattgaccggctggccggccgtcgacggtttcaaagagggcgagccgccggcggaagagatcggcgtggcggtgatcgactgcggcggcaccctgcgctgcggcctgtacccgaaacgccgcattccgacggtcaatatccatgccaccggtcagtccggcccgctggcgcagtttatcctcgaagacatctatgtctccggcgtgcgcgaccacaacatcaaccgaatcgaagcggcagatagccaacccgccgccgccgttgccgcgccgcccaaggcgcgcgactacgacaccagcaagaagatcaccgagcaaagcgacgggctgctggcgaaggtcggcatgggcatgggatcggtggtggcggtgttcttccaggccgggcgcgacactatcgacaccgtgctgaagaccattctgccgtttatggcattcgtctcggccttgatcggcatcatcatggcctccggcctcggggactttatcgctcacggcctgacgccgctggccaacagcccgatcggcctggtgacgctggcgctgatctgttcattcccgctgctgtcgccgttcctcggccccggcgcggtcatcgcccaggtgatcggcgtgctggtcggggtgcagatcggccttggccatattccgccgcagctggcgctgcccgcgctgttcgccatcaacgcgcaggccgcctgcgactttattccggtcggcctgtcgctggcggaagccaaacaggacaccgtgcgggtcggcgtgccttcagtgctggtcggccgcttcctgaccggcgcgccgacggtcctgatcgcctgggccgcctcggccttcatttatcaataatgtgatccccagggagacgtttatgcacaccatttttcacaccaccatcacgcagatcggcggctgcgcccgcgacgcgttgctggacaacatgctgatcaccttccgtgaaggcgccccggcggatatcgaagagttctgctttatccaccgccacggcgcaaccgccggcgagctgcaggtgggcggcgtgatggaactggcgcagcagcgctacgccatcaccgccgtcggcagcgtcgccacgcagaatctgcgcgagctgggccatatcaccgtgcgcttcgacggcgaagccgaagccgaatttcccggctcgatccacgtatccggcccgacgccgaccgatatcccgttgggcagcacgctgtcatttatcgcataaggagtagaccatgtctgaagtagctgtagtgattggcggcggccaaacgttaggcgcctttttgagccacgggctggcgcaggccggttatcgggtggcggtggccgatctgaacgccgacaacgccagtctggtggcacagcagatcaacgaagaatacggcacaggcagcgcctgcggttttcaggccgacgccaccgacgagcagagcgtgatcgcgctggcggcggcggttgaccgggcgtttggccaggctaatttgctggtgtacagtgccggcatcgccaaggcggcgccgatcaccgatttcccgctgggcgacttcgaccgctcgctgcaggtgaacctggtgggctatttcctctgcgcccgcgagttctcgcgcctgatgatccgcgacggcatcgccgggcgcatcatccagatcaactccaagtccggcaaggtcggcagcaagcacaactccggctacagcgccgccaagttcggcggcgtggggctgacgcagtcgctggcgctcgatctggcggagtacggcatcaccgtgcattcgctgatgctcggcaacctgctgaagtcgccgatgttccagtcgctgctgccgcagtacgcgcaaaaactgggcatcgcgccggatcaggtggagcagtactacatcgacaaggtgccgctgaagcgcggctgcgactaccaggatgtgctgaacaccctgctgttctacgccagcgacaaggcctcttactgcaccggccaatcgatcaacatcaccggcggccaggtgatgttctgacgccaatcgatgcccccttcagcagagggggctaaggagaacgccatgacacaagctttgatcgccttcgcgctgctggcctggctgctgcaaatcgccttcggctggtggcaactgcaacgtttcaaccgcgccttcgatggtttatgccggctgggcgccgtgggcgtcggccgttccggcggccgttttcgcccgcgagtggtgctggcgctggccttcgacgccgaccggcgggtgtgcggcagcctgttgctgcgcggcctgaccgttttcgcccggccacgcccgctgcctcatttacacgggttgcatcagcgggatttgcgcccggatgtgatcttccccgaggatcgcgcatgccagtctgcactatcgttagcgattgaacccaaatcgtgatattttcacattaaaagacattacctttcatagtgaattattcagcgaggggaaatgcccaactcttgtgaacgggaatcgcgatgaaaccaaagcagcggcaggccgctatccttgaatatctgcagcgacatggcaaaacggcagtggacgccctggccgagcatttctccactaccggcaccaccatccgcaaggatctcaccctgctggaagaagaaggcgaggtgatccgcacctacggcggcgtggtgctcagccgcgacgacggcgatcagccgatcgaccgcaaaacccatatcaacaccgagaaaaaacgccagatcgccagcgccgccgtggcgctgatcgccgacggcgactcactgatcttcgacgccggcagcacggtgctgcagatggtgccgcacctggcacagttcaacaacatcacggtgatgaccaacagcctgaccatcgtcaacgcgctggtggagctggacaacgatcagaccatcctgatgcccggcggcacctaccgcaagaagtcggcctcgttccacggcagcctggcggaatcggcgtttcagcaattcagcttcgacaagctgtttatcggcgcggacggcgtcgatctcaacgccggcgtcaccaccttcaatgaagtgcacaacgtcagcaaggcgatgtgcgaagccgccggccgcattattctgttggtagactcctcgaaattcggccgcaagagcccgaacgtggtgtgcgagctcagcgccgtcgacacgctgatcaccgaccgagacatcaaccccgattatctcgccgccctgcaggcgaaaggcatcaatatccttctggtaggagaccccgatgagtaacgccaacgccctgctcgcctttgcccgcgaaacgctggagatcgagctgaccgaagcgcagcgcctgctggcacgcctagatgacaacttcgtctgcgcctgcgagctgctgctgaactgccgcggcaaagcggtgatttccggcatcggcaagtccggccatatcggcaagaagatcgccgcgtcgctggccagcaccggcacgccgtcgttcttcgtgcatccggcggaggcgctgcacggcgatctcggcatgatcggcgccgacgacgtggtggtgttcatctcctattccggccgcgccaaagagctggatctgatcctgccgctgctggcggagaacggcattccggtgatcgccatcaccggcggcaaagagtcgccgctggcgctggccgccgcctgcgtgctggatatcggcgttgagcgcgaagcctgcccgatggggctggcgccgacctccagcgcggtcaacaccctgatgatgggcgacgccctggcgatggcgctgatgcgccagcgcggtttcaacgcggaagacttcgcccgctcgcacccgggcggcagcctgggggcgcgcctgctgaaccgcgtgcatcacctgatgcgcaccggcgatcgcctgccgcgcgtgagcgaaagcgccaacgtgatggaagcgatgctggaactgagccgcaccgggctggggttggtggcggtctgcgacgcgcagcagcgtgtggtgggcgtatttaccgacggcgacctgcgccgctggctggtgaagggaaatagcctgcaggatccgctcagcccggcgatcacccgccccggctatcggctgccggagcagtggcgcgccggagaggcactggaagcgctgcacgaacagcacatcagcgcggccccggtggtcaacatggacggcgtgctggtgggggcgctcaacctgcacgatctgcatcaggccggcatcggctgatcggtgctgggggcgccggcagcggcgcccccggtcagatcatttccagtcgggattgttctcgaactgctgcttcagcagcgccttcatgtcttcatccggcttgccgagccactggtacttagcatatttcttcggatgatcgacggcttccggccgatcttccacctcgacccgcacgccccaggcctgggatttgtccgcgctgaacgccacgatcaaaaagttgttgccgcagtcgtgcggcttgcacaggttgccgaccagatactctttgcccttccagctcaagttttgcgccggcgtagaggtgccgacgcccttgcgcgcccagcccggcatccgcgcctggcctttaaccatgttttgccagctggcctgataccccggctgctgaatcaaatccgatgtggtgacgatctgctgggcaaagctgcccgcgctgaagctgagcagtgcgccgaagagggcgcaacgcagcgcctggtgtcccgtcatagtccttctccctaggttaaatcaggtttcgcccataaaaccgggcctgaactagtcagaccacggttgcggcaaaaagttgactcaccaccaggcgtgaaaatgatgcaccggcccgatgccgtgccccacttccagcgtatccgcctgttgcagcgcttgttgcaggtagtccttggcggcggccaccgtggccgcccagtcggcatggcgcgggcgcagcgccgccagcgcggccgagagcgtgcagccggtgccgtgggtgtggcgggtggcgacgcgcggcgcggtaaaacgctgctcgccttcgacggtgaacagccagtccgggctctcgctttcgctcaggtggccgcccttcatcagcaccgcccggcagcccatcgccagcagcgcccgcccctgctcgcgcatctgcgcttcatcttccgccggcgggcacgccagcagcgccgccgcttccggcaggttcggcgtaatgatcgacaccagcggcaacagctcgcgccggatagactctaccgcctccggcgccaacagcggatcgccgcttttcgccagcatcacggtgtccagcaccacgaattccggccggtaatggcgcagccgttcggccaccgcctgcacgatgtcggcgttggccagcatgccgatcttgacgctgtcgatgcgcacgtcgctgaacaccgagtccagctgcgcggcgacgaacgccggatcgatgtaatacaccgactgcacgccgcgggtattctgcgccaccagcgcggtgatcaccgaagtgccgtaggcgccaagcgccgagaaggccttcaaatcggcctgaatgccggcgccgccgctgggatcggtgccggcgatggtcagcgcgttaatacgtttcatcacagatcctccccgcgcagttgatacagggcgtcgaggaacgccggcgtaaagctgcccggcccggcggcctgcctggccgcgaggccgccgcagtgtgacatcacccgacaggcggtcgccacgttgtccaggcgatcgcccggcagggcgcaaaacgccgccgccaccgccgacagcgcgcagccggtgcccaccacccgcgtcatcagcggggagccgccttcgatcgcccagtcgcgttggccgtcggtgacgtaatccaccgcgccggtgaccgccaccaccgcgccgctgcgccgcgccagctcacgcgcggcgggcaatgccgccaaggaatcgtcgccgctgtccacgccgcggccgctggccagcaacccgttgagcgccatgatttccgaggcgttgccgcgtatcgccgccggttgctcgtccagcagctgtttagcgaaggcggtgcggtaggagagcgcgccgaccgccaccggatccagcgtccagggcttgccggcctgattggcggcggccaccgccgcccgcatcgattcggcgcgcagtgcattgagggtgccgacgttgatcagcaggccgtcggccagcgcgctgaactgcgccgcctcttgcggctccaccaccatcgccggggaggcgccgagcgccagcagcacgttggcagtcagcgattgcaccacttcgttggtcaggcagtggatcagcggaggccgctgttggaattgggtcaggcaggccgcggcgcgggcgccgggtagtgcatcaggtcgagcgatcatattcctcccaaccggcgttcaagaaggcggcgccggttgagcggccgtgacttccctacgctggcattatccagatcaggtaatacgggtatttctcagccttcacgcagaagggcaccccgagtcatgaaaatcaataggttgtgatcaacgttgcgttaatccctgcaggggatcatgccagcggcggcgcggacaaacaagcgattaaattggctcgcgcctaagcgatgcttccctcttttcccgccagatacaggctcagcacgccgggcagctccgccagggtaaacgccacgttctgcggcgccgttttgaagatgtggtgcaaggtgccggccaccaggctttgcaacagccgggtttgctgcaggatctccgcttcggcggtctcggggcggcgcagctgcagcactcgggcgatcagcgccaggaagctggacttttcatccggcaggttcatttcccgcatcaccggcaggtagtcggcgtgctcgcgcaggtactgcgcatagggagaaaacagtcgctggatcacctcttcagcggagaggcgcctccactcgtcgtcgctggccaacgccatgtcgcgcaccagcgcctcgatcgattcggtgtgccgatccgccagcgccttgatcaccgcgtggcgatcgggaaaaaagtgatacatcgagccgatggaggttttggcgtgcttggcgagccgctgcatgctgagcgccgccagcccgtcctgcgccacgatcgccgccgccgaatccagaatggtttgtacgcgttgccgccctctttcctgctgcggctcccgcccggtgatgtgttcgtcgatttgcatattcgtttctgcccgctgtcatcaacgcattatacccatttgccgccgcgaaggcagggtgacacaaaaaactagattaactcctctagtttagagtagagtatttattctagtttctccttgcgcaagcgtgaggaagacaaacagtgacctcactcactgaaaaagagtcattccattcggcccgtcgaccaagccaatcgccagagaaagccctatgcccgacaaaaaactgcttatcacctgcctgaccgcgctgctgctcaccgggtgctcaccggcaccgtccatggtggtgttcggcgcttcattccccgactggctgttttgcctgtgcggcggcgtggcgggcatggtggcgatccacctgctgctgcgcgccccggaaaaacgcgcctggctggcgccgcagctgctgacgtatccggcgctgaccgcgctgatcgccatgctgacctggttactggttttcccccactgagactgacgccatgacccaaccacaaacctctaacaagcgcagactgctggtgcttaccatcctggcgttgacgctcatcgtggccgccgtcgtcgtctggcgggtggaaaacgcccccactaccgacgatgcctacgcctatgccgacaccatcgacgtagtgccggaggtgaacggccgcatcgtcgagatgccgatccgcgacaaccaggaagtgcggcaaggcgatctgctgttccgcatcgatccgcgcccttaccaggacgcgctggcggccagcgaagcgcgcctgatcacactgaatgaacagatcaaactgacgcagcgttcggtcaacgcgcagcagtacaacgccgaatcgatgaacgccatcgtcaaacgctcgcaggcgctggtggcgcaggcgaccgacaccctcaaccgccggcagaagctgctcggcaagaactacgtttcggcggaagaagtggaaaccgcccgcacctcccagcgctcggcgcaggcggaactgcaggccgcattgctgcaggcgaaacaggcggaagccgccgtcagcggcgtcgaagccctggtcgcgcagcgcgccgaagtgcaggccgacatcgccatcgccaagctgaatctggaatttaccgaggtgcgagcgccgttcgacggccgcatcgcctccctgaaaaccaccgtcggccaatatgcctccagcgccaaaccggtgttcacgctgatcgacacccgccactggtacgtggtcgccaacttccgcgaaaccgacctgaaaggcgtgcatcccggcgtgccggccacgctgtatttaatgagcgacgccggccagaccttcagcggcaaggtagagtcggtcagctacggcgtgcagcccgacgacggcggcagcgtgctgggcgggctgcccaacgtgtcgcgcaacatcaactgggtgcacgtttctcagcgcttcccggtcaagatcgcggtagaggctcccaacccggcgctgttccgcgtgggcgcttcggcggtggccaagctgaacctgcgccatgaagaataaaacgatgtatcgcggctggctgtcccagttgatcgacgagctgcgcccttcggacagccgcataaacctggtgatccgcgccctgctctccagcgcgatcgccatcgtgatctcgcagacgctgcaggtaccgtggctggcgctgtcgctgatcgcggtcttctttatcacgcagtccaatatcgtgatcacccgcgcgatcggtatcctgtttttcgtcagctccacgctggcgatcggcgccgctatcctggtgctgaagttcacctacgactacccgatgctgcgcatcttgctctccagcgcgctgtttttcctcagcgtgttcctgatgcgggtgaccaaggttggggtgctgttcttcctgatggcgctggtggtgatctacacgcaaagctttgtcgatctcactccgcaggcggaagtggtgatacgactggtgctgtgggtatgggtggcgatcaactacgccatcctgctcaccctgatcgttaataccctgctgctgccggccgaaccgctgaaacagctaaagggtcggatgaacgcggtgttggacgaaacccgcgctatgttgaccaacggcggcgagacgcgcgatctgagcgccatctcccagcacgccaccgagctgcataagctgctgcgcttttcggtgatgcgcagcgatcgctgccgcgccaacgagcccggttatctggcgctgatcaccctggtgttgcagctcaatatcctggcctaccagctgccgccggctttcggcgcggccgcgcgtcaattggcgcaagagatagatgccgcctgccgcgcactgcaaaccgcgataagccacgaaagcgcactgcgattttccgtcgcgatcgccggcagcgacgatccgcaggtgccggcgccgctcaatgaaatggccagcctcctgcaggtctacgccaaccgcagcgactacgccgacgccctgcaggccgcaccgccgccgaaagtgcccttctttacccccgacgccctgaccaacccggtttacatccagttttcgttgaaaacgctgctgaccgtactggtcgcctacgtgttttataccgccgtcgattggtccggcattcataccatcatgctgagctgcctgatcgtggcgcagcccagcctcggcgccacacagcggcgggcgcggctgcgtctcggcggcgcggcgatcggcagcctgctggcgctgatctcggtggtgtggatcatgcctcacctcgacagcctcgtcggcttgctgctgctgacgctgccggtgatcgccctctccgcctggatcgccgccggctccgagaaaataagctatgccggggtacagatcctgttcaccttttccctggcgctgctggaaagcttcggcccggtcaccgggctgaccgagatccgcgatcgcctgatcggcatcgtgctgggggtagggttcgccaccttcattcacgccacgctgtggccggaatacgaaggggagtcactgcggcagcaggttgccaacgtgctgcgggaactgtcgcgcttcctcggcggcgagaacacaaacgccatcggcatctggcaaaagatcgagggctgcgaagcggtagtggcccgggtgacgctggagccaacctggcagctggcggacgataaccatgaaagcttcacccggcatatccaactgatctttaaccagacgcgcagcctgttgctgaccagcgaaaagctcaacacctatctggcaggcagtggcgcggcgctgtccgcgcaggaacgccaggcgctgttcgaggtgcaacgtcagggcgggcgcgttctcgccgagtatgcggcgcagctttcccgtgcgccgcaagcgttgcgggcgcccgactttcatccaccgttggccgccctgcacgccgacaccgtgcgccacctggctcaggagctgagcgacggggtcaatcgcctgcccgcctggggcgacgcctagcattttccgtttgcggccatgcacgcccggcgccatgcgctatagtgagcaaaaaccaccgggagatgccatgcaaataagaccttaccaagaggccgatcgccccttcctgcgcacgctgtacctggcgtcgcgcaaggcggcgttcggttggcgcgatacctcgaactatcagttggaagatttcgaccgcgcgacgctgggcgaagcgatttgggtggcggaagacggcggcgtgctgctgggattcgtctccgtctaccgcgaagacaacttcattcataacctgtatgtcgatccccatcagccgccgcgcggcgtcggcagtgcgctgctgcaagcggcgcaagccaccttcaccgccaccggctcgctgaaatgcctggtgaaaaatgaaaaagcgctggcgttctaccgcaaacacggctggcgcatcatctccaccggcaacgacggcgaagaagattattacctgatgcattcgccggcccgctagttcttacccgccgcatccggcatcccgcgcagcgtcagccgccaaaacagcaacgcgctcaggctgacgccggcccccagcccgcagacgccgctccaacccgcccaggcgtacatatgggtgccggcaaaggcgcccagcccgctgccgacggcgtaaaacagcatgtagcagcccaccagccggctatgcgactgcgggtgggcgctgaagatcatgctctgattcagcacgtggatcgcctggcccgccagatccagcagcacaatgcccgccaccagccaaaccaggccgctgccgagcaaaccgagcggcagccaggccagcgtcaacagcagcagacacgcgccgctggccgcctgccccagcccgcgatccgccagatgcccggcgcgcaccgccgccagcgcgcccaccgcgccgaccaggccgaacgctcccaccgcggcatgggtgaagttgaacggcggccggctcagcggcaacaccagcgaactccaaaagaggctgaaagcgccgaacatcagcagcgccagcatgccgcgaatttgcagcgtgcggtcatgccgcaacaggctcaacattgaacgcagcaacgcgggataactcagcgtgctgggcgcggtgcgcggcgcaggcagcaggcgcgacaggatcggcagcagcaccagcgtcactccggctgagaagaagtacaccatgcgccagccgccgacgtccgccagcgcgccggagagagtgcgcgccaacaacagccccagcaccaccccgccctgcgccgcgccgaccacccgcccgcgctcctgcggcgccgccagggccgcggcgaatgcgatcagcccctgcgtcatggcggtgcccagtagccccaccagcaacatccccgccagcagccagggcgcgctgtgcgcccagcccaccaatagcagcgcgccgatcagccccagctgttgccccgccagcaatcgatgccggttcaaccgatcccccagtggcaccaccaacagcaacgccagcgcgcagcccaactgagtcacggtgatcaccatgccgaccgccgccaggctgatggaaaaatcgcgggcgatggcgtccagcagcggctgcgcatagtaaacgttagccacgctaaaggcgctggcaccggccaacagcagcaccagggcggccggcagacgccccagcgccgcacagggaggatccagcagtttgtcgctcatcgcacacctcaatctggtttcataattaaacccaatgaactttagatgcggaggttttataatgcaaccagaatatgtcgctggagataaacgccgtgaaacgtaaaagcctggaagacgcgccgtgcccggtggcgcgcacgctggatgtgattggcgactggtggtcgctgctgatcgtgcgcgacgccttcgacggcgtcacccgtttcagcgagtttcaaaaagggctggggatggcgaagaacattcttgccacccggctgcgcgccctggcgacgcacggcgtgctggagatcgtgcccgccgcggacggcagcgcctatcaggagtatgtgctgaccgagaaaggccgcgcgctgtttccggtgatcgttggcctgcgccagtggggggaagatcatctgttcgccgagggagaggcgcactcaacgctggtggaaagtgacagcggccgccccgtgccgcgcctgacaccgatcggcagcgccgggcagacgctcaccccgctgaatacccgagtggtgaaggtgggggaacgctttgagccgtcttttaacaatccccaattagcgataaaagaaacacttccaaccgaaatcgccgcacagatcgacgccgcatgcaacgtgctgacagaacaactcggcgagaaactcttgggcatccatctgtatggatccgcggtcgatggcggtcttaaacccaacagcgatatcgacatcttggtcgtcatcagcaagccgctgatgtcaaccactcgggccgcccttatgaaagctttgctgaccgtgtcggctccgccaggtgccgacagtatttttcgcccgctggaagtcaccgtgctggtacagaccgacatcaaaccctggcgctatccgccacgacgtgagctacagtttggcgaatggctgcgtgaagagttgctggtgggaattgtctcccccgccaccttggatcctgatgtggcgatcctgcttaccaaagcccggcagcatcatcgacatctgttcggcgcctcctttgaactcctgtatgacagcgtccctcgcagcgacttcatcgccgcgctcaccgataccctgagtcaatggaacgagcctgatgactggcatggcgacgaatgcaacattgtgctggcgctggcgcgcatctggttcagcgcggcgaccggtcggatcgcccccaaagatgtggccgccgaatggctgctggaacacttgccatctgaacaccagccggtactcagcaccgcgcggcgaatttatctcggacaagcgatagatgatctgcctcagcatcagcagccgttggcagcattcatcggctatgccaaaacgacgatcgcaagtctattgacgacaacagcatcgcaataagacgcaagcctgtcgacaccacttattgatgcagggacggattttgttcatggccgccgccccctgcatgattcgcttcgcagcgtcatccgggtaatgtatagtccgcgttttacggagaacccatgctgactaactcatccattcgtctgaacaaatacattagcgagagcggcatctgctcacgccgcgacgccgatcgatacatcgaacagggcaacgttttcatcaacggtaaacgcgccaccgttggcgcccaggtatttgccggcgatgtcgtgaaggttaacggtcagctgatcgaaccgcgcaatgaagaagatctggtgctgatcgcgctgaacaaaccggtcggcatcgtcaccaccaccgaagacggcgagcgcgacaacatcgccgacttcgtcaaccacagcaaacgcatcttcccgatcggccgcctggacaaggattcgcaggggctgatctttctgaccaaccacggtgacctggtcaacaagatcctgcgcgccggcaacaatcacgagaaagagtatctggtgacggtcaacaagccggtgaccgacgagtttattcgcggcatgggcgccggcgtgccgatgctgggcacggtgaccaaaaagtgcaaggtgaagaaagaggcgccgttcgtgttccgcatcacgctggtgcaggggctgaaccgccagatccgccgcatgtccgaacacttcggctacgaggtcaccaagctggaacgcacgcgcatcatgaacgtcagcctgaaagggttgccgctgggcgagtggcgcgatctgaccgatgacgagctgattgaactgttcaagctgattgaaggctcttcatccgaggccaagccggcgaagaaggccccggccaaatccgccgcggcgaaaaagccgagcgccggcgggccgaaaagcgccgacaaagccgctgcgccggccggccgcaagcgctttacccagccggggcgcaagaaaaaagggcgttaaacgccttcccccgttcagcccgccgttgcgcgggcttttttatcgtgaaagtcagccacaggccgccactgagttctcaccataaaaaaggcccgcatcatgcgggcccgtcggtaccagagaagtctagagggaaaatcagaacgaccagcgcaggttggcgttgaccgaattaacgcgggtatcggcgccgaattgcccctgatagccgacatccagcgacgcagcgcgcgacagcttcacgctcacgccgatatcgcccaccatcacgttgtcatccacggcctggccctgcgtgacgaacgcgtcgctgccggcaaacgccatgcgcgatgaggtgttcttatcgccgtaggcatgctgccagccgagcgagccgtagaggctgacgttcttcggcagttcggtcacgccgcgcaccccgagcgtggagtagaaggtgttcatcgtttcattgcgcacgctcagcgccgccgcgccacccgactcctggaagctgtcggtatgcagtcggatgtagctcaggttgatgaacggttcgacgttcatctccggctggccgaaacggtaacccgcttcggtgaacgccagcagcgagttggcgtcgtaatccgacttcagccgatccgagaagccgctgaaatcgacgttgcgcttgccttcaatcttgtgccaggtgtaacccaacgcgccgcgcagcgagaacgcatcctgctgcccggccgcatacaggccgaggtggtagttgtcggtatcggccttggaacggcggctgtcgacgtcatagtcgccgcggctgtaaccgaagtagccgccgatgcgcacgttatggtccgccagtttgcgatccgcccccaacaggaagccggtggtgttgccatccagcttgcccacgttgccgttgccgctgtttctgccccaggaactgaaggtctgcccccagacgccgctgttttgcgcctgcgccggttgcaccagcgacatcgccaacggcggtaccggcagactgtcgttgtcgaacaggcgcagcatgcgctggttcagcacattgaacagctgggtgctgccggcgatcaggttagactgcatcgacggatagacttcgccggacagctgattgaacgcctcgcgcgcttccggcgcgctcagcagcagcagcgagttgtacagcgccagcgaaggtccgctctgcgtcagcgtcgagagcgcgccggcggtattccactggttgccgctctcggccaccgtttggaaaatgcccggcttgccgctgcctggattctcgccccccggattttccccgcctgggttttctccgcccgggttctcgcccccaggattctcaccgcccgggttttctccgcccgggttctcgcccccaggattctcaccgcccgggttttccccgcccggattctcgcctcctggattctcaccacccggattttcaccgcccgtatctttctgcgcgatggtcagatccacggcgttggcgctgtggttcagcgccacatcgaggaaggcagacttggagaccgccgacgcgaactggccgtcaatgccgccgtccgaggtcagaatgcggtagctttggccggttttatagctggtttgcggatccagcgccgtcacctgcactttggcctgatcgctgatggtggttttgcccgccaccagcagctggtcgctgcggccgtcgccggcgatatcaacgtcgtagaaggattcgccgataaagttcaggtagcgtttcagcgtcaaggtgccgatattgccgtcgccgggcgagatatgaccgccggactggatctcggtctggcccagcgtgccgttgccgcccagcgtgccgccggccttgatcgacgcggcgctgctgtaaccctgcccgttattgacgtcggaacccgccgtcgcattcaggatcagcgtgccgccgttctcggcgccgagggtttggatctcgaagatgtcgtcttctttctgggtattgatgtcgctggcgatgatgagcttgccgccgcgcgcggtgacgttcgcctgcagctcagagagatcgccgttcagcgtcgtgtgcccggcgctgttgatcacctcgccttcgccgctcatcttgttgctgaaaacgtaattgccgtcggtatggttaaagtacacatagctgcggaacaatccgccccgcagggcgatcgccgtctgggcatcgatggctccagcagcgcccgccgcgccgagcgtcggctcggtcaacccggtgccggtgtccatgttgccgcggctgccgataatcagcgcgccgcggttcgagccggaaccggtctcgcccagcaccacttcgttgccgccggcggagaatgtcccgccgtccatgaccgccaacacgccgttgccgtaatcgccgacgttgacgctgctgccgctggtaaagcgcgagccgttgccggcgaccaccagctcagcggttttacgcgcgcccgagacacccgccacctggatgttgccgacgttgaccgcagcgccgttcagcacgtccagatcgccgtagagcgtgagcgcgcggccgacgttccactgggaattggccccggtgaccgtggctttcgggctcagcgtatcagtctcacccggtccgctgccattgccgatgcgcgcgtcaaaggcggtgttcagcaccgcgccgtcttcgatcgccagcgtggatcgtgcccctaaatcggtgccgacactgagaaaattgctggtgacgcgagaaccggcgccggtggcgatcaggtggctgtcgtagccacgggtggtgccgaccacgatctctttcgcgctggccagcgcgccgtcttcaacccgcagggtgccccgccccagattcaggccgccgcgcagcacgaactgatcgttcaccgcgttcagctcggcgttcggcccgcgaaccgtgaccacgctgtcgtgaatttggccgttgaacatccggccgatattgatgttataggcgctgatcttgccattctcgatcagcaggttgccgctttgattacggccgacgtaaacgtccccggtgtaggccaatgattcggtaatttttgagtcgccgtcaaaaatggcatcgtctgcgcgagcgagatcggcgggcgccagcatcaacaacggcgcggaaaatagagcgaggtaaagtttggaaagcggtgttctaaccgctaaagggtgcgatgttttgtcattcacgggctatctccgtactcgttagcgtgatgtcgcgaaatttattgttatagggaactcaatacactagaggagaagtgaggcgttatttcgcgcacgccggtttagtgatcgtcgaagcaaaagcttattgccccccggcgctgacgctccgacgatgaaaaaccaggaagcggtaataccgcccccaaagcgaattatttatgcgtgaccaccggtgtacaggtcggcgcgctcagcgacggcgaggaacctaaaattcccggcatcatcagcgacgagcaatcgaaaatgcggcctttttccgtggtggcgcgatatgaaagtttttggccgcccagcgcatccggctgtgcgccattgacgttggtcacggtaatttcgtccgacgatcccagccccagcattttggcggtttccgcctgcagtaatggaatggcctgatcggttttcaaggtggaacaaccggctaccatcatcgtaacggttaaagcgataagtggtttcttcataaattatcctttataaccaatcagttaaaattaccgattggctttatgttttctcttatccaaatcctcgaataatatatttccctttcctaaacgaaaaaaccctcctaaagtagggagggttgataataattcatcagacctatctgatatttgaaggcgaaaggagaatcctttggggcaggattatgcgttggtcgttgatgaccatccattggtagcaagcggcatcgccaattttctcagcacgcattgccgattcaaacaggcgcatgtggtgaccaatgaagagaattgctaccgccatattagggaaaatggcccaccgcgtttactggtgatcgatttttggctttcttccggtacagcgttgaaattactcaaagaagtaaagcaactttaccctcaggtgcggatcttggtggttagcggcgacgagaataacgatatctggcagaaagtgcacactgccggcgggcatggatttgtattaaaaaacgaaccgcctgaattattcgccagggcggtttttgcgttgaataataatcaggattggttccctgacggtaatgaaacctgcattaaaagccatcatgagcacttaaataagttcaatttaacgccgaggcaaatcgacgtattaactatgatgctgcgcggcctgccaaataaaagaattgcgacgcaactgtctatttccgaacccaccgtcaaagaacatatcagcaatatattgaaaaagatcggcgtcaacagccgggtggaagccatcacgctgttgcacggcaaacgggatccgtcgtcatgaggtttttccagcatttacaaaatgatggcatctccccacgcgcgcagatccgcctgctggacaacaccttcatgcggctggtgttcagctttaccgccgtgcctttcgtcggcatccctttcgccatctggatttatttgctgggtgatgaactcggcccaaccattgcctggatcatggtttacctgctatgcgccgtggcgatccgaatatggcatcggcgctatctgcgcgaggctaaagaaaatgatgaagacaccgtgctgcgccgctggctgccgcgcattaataaggtggcctttattcacggcttggggatctcctcactctatttaattacgccgcagacccataactttgacttttttctgctgctcaatatcagcatcgccgcgatcgtcgccgccaacgcaacgcacctgacgccggtcatcagcacctttacccgctttttcttcgcctcctgggggctgctgaacctcggcatcatctggcggctggaagacgtgatgttcatcgtgctgatgctgaacttgctgtacggcttcgccatttaccgccacgcgttaacctcgcatgcgttctttattcagcaggcgctgctcgaagaacaaagctcgcgcctggcggagcagttccgtcaggccaaagaagaggcggaacaggcgctgctggataagaaccagttcctgaccaccgccagccacgatctgcgccagccggtgcacgccatgggctttctgatcgaagccatcatccacaaaaacctcgacgacagcctgatgccgcagttgctggatctgcaacaaagcgtgcgttcggtgcatttgatgttcaattcgctgctcgatctcagcaagatcgaatccggcaacgtgcgcaccgccgccacccatgtggatatcggcgccctgctcgactcggtggtcaccctgttccgcgaagaggccaacagccgcgccctggcgctgcgcacctggcggcccaaacggcgcatcagcgtgatgggcgatccgctgctggtgcggcaatcgctgatcaacctgatccagaacgccctgcgctacacgcaacgggggggcgtgctgattgccatccgcccgcgcggcgccgagtgcctggtggaagtgtgggacaccggcgtgggcatcgccgacgaagagaaaagcaaaatcttctccccttactaccgccccgagctggcgtggaaaatcgacagcgccggccacgggctggggctggcggtggtggcgcgctgcgccaagctgatgaaggtgaagtacggcatgcactccgtcgaaggcaaaggctcacgcttctggatgcgcttcacgcaatacatcggcgaagataaagcgccggaaaccgccgccgcctacgacaacaccgccacgcctacccgctatgcaccgctgcgcggcgcctgcctggtggtggacgacgatcctttggtgacctccgcctgggagagcctgatgagcacctggggcatcaccgtgcgctgcgcggcctccgccgaggaagccttcgccattgtcgacggcggcttcacgccgttcgccgtgctgtgcgaccagcggctgcgctccggcgagagcggcttcgacatcctgcaggcgctgttcgaacgcctgccggacgtgagcggcgcgatggtcagcggcgagttcaattcgcaaatattgcaagaggccgagcaggaaggctatctggtgctgcgcaagccgctggaaccggccaggctgcatgcgctgctgacgcagtggggggctggctagcgcatattgagggctatcaggccatgattaaacgcttaaacagcagctgctggatatcctgccgatgtgacaatggagtcaatacagcgccttacggtacgcgtgtactccaaggccacccgctgttccattgcaatcccttaatgctgagcactgtagtgcttaaagcccatccaacagcggttccttcgagaatacgcgcccttccgctttatccttctctgacagcgtcagcaatttcagcagagcaatggcgttctctcgctcctgctgctcataggattctataacgtagttgatggcctctactttcattatgccccctggtgctaccaatcataccaaggtccgaacataggccatatttagaccacaaacaataatctgctttacccatgactggaaccaggcggaaaagatatggccatataaagaaaaaccctctgtaaaaacagagggtttcagtcacgtcggcctagttacgaacaggctgtgaagggattaatcattcccactcaatcgtcgccggcggcttgccgctgatgtcgtacaccacgcgggagatgccgtccacttcgttgatgatgcggttggagacgcggccgaggaagtcatacggcaggtgcgcccagtgcgcggtcatgaagtcgatggtttctaccgcacgcagggagaccacccagtcgtatttgcggccgtcgcccatcacgccgaccgagcgcaccggcaggaacacggtgaacgcctggctgactttgttgtacagatcggctttgtgcagctcttcgatgaagatggcgtcggcgcggcgcagcagatcgcagtactctttcttcacttcgcccagcacgcgcacgcccagacccgggcccgggaacgggtgacggtacagcatgtcgtacggcaggcccagttccaggccaattttgcgcacttcgtctttgaacagctctttcagcggctcgaccaggcccagcttcatctctttcggcaggccgcccacgttgtggtgcgacttgatcacgtgcgctttgccggtggcggaagcggcggattcaattacgtccggatagatggtgccctgcgccagccatttcacctgctcttgcttgcaggcttcttcgtcaaacacttcaacgaacacgcggccgatgattttacgcttggcttccggctcgtccacgcccgccagtgcggtcaggaagcggttttccgcctcaacgtgcacgatgttcaggccgaagtggtcgccgaacatttccatcacctgcttggcttcgttcaggcgcagcaggccgttgtcgacaaacacgcaggtcaggcgcttgccgatggcgcggtgcagcaacatcgcggtgacggaggagtcaacgccgccggacagaccgaggatcacgtggtcctcacccacctgctcgcggatgcgctcgaccgcatcttcgataatggtggccggcgtccacagggcttcacactggcagatgtccagtacgaagcgctccagcatgcgctggccctgacgggtgtgggtcacttccgggtggaactgcacgccgtagaagcgtttttcttcgttggccataatggcgaacgggcaggtatcggtgctggcgacggtcacgaagtcggacgggatcgcggtcactttgtcgccgtggctcatccacacgtccagcagcggtttgccggccgggctgatggcgtcttcgatgtcgcgcagcagcgcgctctcgttgacgatttccacctgcgcgtagccgaactcgcgttcgttggagccctgcacatggccgcccagctgcatcgccatggtctgcatgccgtagcacacgcccagcaccggcacgccggcgttgaacacgtagtccggggcgcgcgggctgccggcttcggtggtgctttccgggccgccggacaggatgatgccgcttgggttgaattcgcggatctgcgcttcgctaacgtcccaggcccacagttcgcagtaaacgccgatttcgcgcacgcggcgggcgaccagttgggtgtattgcgaaccgaagtccagtatgaggatgcgatgcttatggatattttgtgtcatgtgaggcgaattccagcaacaagagaaaaagagcgaaaatgtatgttttcgggatggggcttggcgccccaccccggcctctcactcaggagaggttaaggcatcagcccatgcggtagttcggcgattctttggtgatggtcacgtcgtgcacgtggctttcctgaatgccggcgccgctgatgcgcacgaactccgccttggtgcgcagatcgtcgatggtggcgcagccggtcaggcccatgcaggagcgcaggccgcccatctgctggtgcacgatggctttcagcatgcctttataggccacgcggccttcgataccttccggcaccagtttgtcggcggcgttatcggtctggaagtaacggtcggaagagcctttggacatcgcgcccagcgagcccatgccgcggtaagatttgaacgaacggccctgatacagctcgatttcgcccggagattcttcggtgcccgccagcatggagccaaccatcacgcaagaggcgcccgcggcgatcgctttggcgatatcgccggagaagcggatgccgccgtcggcgataaccgggatgccggtgccttccagcgcttccaccgcgtcggcgatggcggtgatctgcggcacgcccacgccggtcacgatgcgggtggtgcagatggagccagggccgatacccactttcaccgcgctcacgccggcttcagccagcgctttggcgcccgcggcggtcgcgacgttgccgccgacgatctgcagatccgggtatttggcgcgggtttcacggatgcgctgcaacacgccttcggagtggccgtgcgaggagtcgatcagcagcacgtcaacgcccgccgccaccaacgcgtcaacgcgctcttcgttgccggcgccggcgccgaccgccgcgcccacgcgcagacggccgtgctcgtctttacaggcgttcggcttacgttccgctttctggaagtctttaacggtgatcatgcccagcaggtggaagctgtcgtccaccaccagcgctttttctacgcgcttttcgtgcatcttctgcagcaccacgtcgcgcgcttcaccttctttcacggtgaccaggcgatctttcggcgtcatcaccgcagtgaccggctgggtcagatcggtcacgaaacgcacgtcgcggccggtgatgatgccgaccagctcgttgtcttcggtaacgaccggataaccggcgaagccgttgcgcgcggtcagctctttcacttcctgcagcgtggtggccggagtaacggtctgcgggtcggtgactacgccgctttcatgtttcttcacgcggctgacttcttcagcctggcgctcgatggacatgtttttgtggatgaagcccaggccgccttcctgcgccagcgcgatggccaggccggattcggtaacggtatccatggctgcggacagcatagggatgttcaggcggatggttttggtcagttgagtgccgagctctgcggtgttaggcagaaccgtggagtgggctggaaccaggaggacgtcgtcaaacgtcagagcttctttagcgatacgtagcatgggcaatatctcaccagggtgggctgtgaaaaagataaaatattgccgcggcattatacagagcggaatcggttgcctccagcactttcttacaaaaagtcttgattacctttttcagccatgtagtatcgaccaattaagtgattgttttgaaatttgatctgggtcacatgtcgctacctgtttcgccttccatttttaccgtaagccgcctgaatcagacggttcgccaactgctggaaatggaaatggggcagatttggctctccgccgagatctccaacctctcccagcccgcctccggccactggtatttcacgctgaaagacgaccgcgcccaagtgcgctgcgcgatgttccgcaacagcaaccgacgcgtcaccttccggccgcaaaacggccagcaggtcttggtgcgcgccagtatcacgctgtatgaaccgcgcggcgactatcagctgatcgccgagagcatgcagcccgccggcgacggcctgctgcagcaacagttcgagcagttgaaacagcgcctgagcgccgaagggctgttcgatcagcagttcaagcagccgctgcccgccccggccaaatgcgtcggggtgatcacctccgccagcggcgcggcgctgcacgatatcctgcaggtgttgcagcggcgcgatccgtcgttgccgatcgtcatctaccccacctcggtgcagggtgcggaagcgccgatgcagatcgtgcgcgccatcgaggccgccaaccgccgcgatgaatgcgacgtgctgatcgtcggccgcggcggcggttcgctggaagatctgtggagcttcaacgacgaacgcgtggcgcgagcgatcttcgccagccgcattccgatcgtcagcgccgtcggccacgaaaccgacgtcaccatcgccgacttcgttgccgacctgcgcgcgccgaccccatccgccgccgccgaactggtgagccgcaatcagcttgagctgttgcgccagctgcagtcgcagcagcagcggctggagatggcgatggattactacctggcgcagcgccagcagcagttcacccgcattcaccaccgtttacagcagcagcatccgcatctgcgcctggcgcgccagcagacgctgctgttcaagctgcagcgccggatggaagacggcatgcagcaacagctgcgcctggccgcccgccgcagcgagcgcgcccagcagcggctggcgcaggtgcagccgcagggccgcattcaccgctaccaacagcgcgtgcagcagcaggaataccgtctgcagcaggcgatggagcggcagctcaacgcctaccgccagcgcttcggcgtggcctgcagccagctggagaccgtcagcccgctggcgacgctggcacgcggctacagcgtgacgcaaactccgcgcggcgaactgctgaaaaccaccaagcaggcgcaggtcggcgaactgctgaaaacccgtctgcaggatggctgggtggaaagcgaggtgaaaaccatcaccgtcgccaagaagccgcgcaagaaacgcgcggccgaatagcccctactccagcgtaaagcgctcgcccggttcgccgttcacccacagcgcgcgcgtttcgccttccggcaggctgagcgtcagcgtgcgccaggccgggcggaaatgcccttccgtcgtgatatccagcatgatgcgctgatggtcgcagcgcatttcccagcgcagccacagcgcatcgccctgccgccaaccttcgctttcgccgtcgtcctcaaacaacagcccgctgctcacgccgcaccccttgagcggaaacagccgcagctcgcgccgatcgtcggcagccacgtccacatgcgccagccgctgcgacaacggcagcgccgccccggcgcgcaccagcagcggcaaacgctccagcggcgccgccagcgtcaccgtctggccaccgccgaaccactggccgctgtagaagcagtaccagccttcgccgttgtccggtagatataccgaacgccagcgctgccccggctccaccacgctggccaccagcagatcgcggccgatcagaaaatcgtcgttctcgccaaaggtgcgcgcatcctgttcgtgatcgagaaaagtcgggcgcagcattggctcgtcgtcggcgcaggcctgccacaacagggtgtagaaatacggcagcagccggtaacgcaggttgatcgcctcacgtaccgccggggtagcggccgggtacatccagggctcattgaccgtggcgtcgtcgttccaggagtggatggtgaaacgcgggtgcatcacgccgttttgtacccagcgcaccagcagctccgcgtccggtttgtcgccggagaagccgccgacgtcgtggccgaggttatacaagccggacaggctcatgcccagccccatgcggatgttgtagcgcagcgtctgccaactggtgcggttgtcgccgctccaggtctgcacatagcgctgcatgccggcgcagccggagcgcgagatcaggtacgggcgtttctgcggcgcgaagcgctgctgggcctccatcgaggcgcgcatcatcagcagcggcatcaccgggcggatgtgcttgatggcgatcggccgcccgaagccgtgacagcgcgcttcgccatcccacacttcgtactcgttgttgtcgttccaggtggaatcgatgcccatctccagcagctgttgcgtgacgccctgctgccaccagcgtaccgtcgccgggttggtgaagtcgaggtgcgatccttcatcgtcccagaagctggagcgttccggcgcgtcgctttgcgaatcgcggataaacagcccctgcgccgccacctcttgatactgcggatgatcctgcagcaggcacggcttgatgttggccgccagcctgaggccggcgtcgtgaaacgcctggctgagcagcttgggctgcggcaccttgtcgtagttccagttgaacacgtagcgtttgtggttgatcgaggtgtagcccgacgacagctggaaggagtcgcagggaatggcgtgctggcggcacagcgcaatgaactgctgcagctgctgctgggcgtccggcgcgtcggtgtagtgcatggtcgagccgctgtagcccaggctccacttcggcccgaagtgggtgcggccggtcaggcgcacgaaggccttggtgacgtccaaaaccttcggcccgaggaacaggtagtaatccagatcgcccgcttcggcctgatagcggcgataggccgcgtggtaattgtcgatctcgttgcccagatccagccagcagctgctcaggttgtcgtagaacagaccgaagctcgcctccggccctcgggtgatggtgaacggaatgtgcttgtacagcggatcggtgctggcggcgttgtagcccatggcgtccagattgcgcatctcgaagcggcggccggtgcgttccagatcgccggctttctcccccaggccgtaatagcgctcatcggcaaaacgccgctggtagtgcgccacgccgtcgccgtgcgcattgagcaggtaggcgctggtcggccgatccgccgccagcggccgccactcgccggcggcattgcaatgctcccattccaaccacagcggctgatgcaccgtcacgcgcagcagcggcgtgctgaccaccagccgatcgcccgcctggcgcagctgatagcccggcaggctgaaaccggcgacgctgagccgatcgcgcccctcccagggcacatcgttctgcggcgcgatgctccaggtgcgatccagcgccagctcgccctcacgtttgatcaacacgcggaacaggccgtcttccagcacgtacaggcagaaacgatggcgttcatcgaccagcagctcgacatggtcggcatgctgcgccgccaatgtccaatttttcaaggttttcatacatattccacttagctgtgtgaaggggttttcttaccgccgcgctcggcgatcagggcaatcaggaacacagcgccgatcagatcgaagaagcccatcgcgatgaacagcgggttgaagccgatggtgtcggataccgcgccgatcagcagcgtgaacaggaagctggcgatccaggcgctggagccgcgcatgccgttgaccgtcgccatctggtttttatcgaacgattccaccaccagggcgctgagcatgcaggagatcacctgatggccgaaaccgccgatcgagatcagcgcgatcgccacatagggatcttgggtgatcgccacgaacgccagcgacaccatcaggaaagcgccggtcaccgagctggcgaccaccgagttgacgcggctgcagccgaaccatttgcggtacagggtggtgagatagccgctggcgacgctgccgatatccgccgccaggaacggcagccaggcgaacatcgcgatctgtttcagatccatgccgcgttcggtggccaggtacagcggcacccagaaactgaagaccgcccaggccggctcggcgagaaaggccgggatggcgatgccgtaaaacttcttgttcttgcacaggctggccagcgaagtgaaaaacggcagcttcggcaacaccggctcgttgtcttcgcggatcagatccagctcttgctggctgaggttcgggtgctgctgcggggagtggtagaacagccaccacagcacgacccagatcagcgccagcccgccggagaacaggaacgccccctgccagccgaaggagacgtgagcgataacgatgatcggcggcgccaacatggcgccgatggagaaaccgacgcccgcccagccggcggcgatcggccgctcctttttcgggaaccagtcggagatcgccttggcgttggccggggtggccgccgcctccgcgccccccatgaagaagcgcagaatggccagttgcagccagctgccggcgccggcgtgcagcatgcataccaccgcccaaatgccggcgcagatcagaaagcccatcttcaggccgatgacgtcgatcagccagccgcagatcggctgaaataccgtataggccagctggaacgacgccaccacccaggcatattgctcggtgctcatgttcaggctggttttcagctccggcgccagaatgcccagcgagttgcgggtgatgtagttgaccgtgacgcccagcaagaacagcgccagcatccaccagcgcagcgatttgaacttgcgccggccgctctgcgcgaccgcctgattgatctccacactcatcagttctctccccgcggccgcctgtgacagcgacgcgcgcattggtaaggtacgttgcgctatcaaaagggggacggtgaacacaggccaacgctcgcataacagaccggcagtccatcacaaccccatgatttattttttgttttctttttcgcacaccgttaaaattggactgacatgtcccaaaattggtgtaccaatgcagactactcagcgatagcgcacagcgaaacggggttttttgcaaagattttcacaagcgggtgaaaaaatagtcataatggccgacaaagccggtaaaaatgctgaaaatccgtagtgaaaatattctcacggatgaatttgaaggagatcacaaaatgaacggaaagctgaaaatccaggagatcgcccgccaaaccgggctgtcgatcagcaccgtttcccgcgtgctggccggcaaggccaacaccagcgccgaggcgcgccgcaaggtgctggactgtgcgcagcaaaacggcattctgcagggcatttccagcggccggctgatgctgaacaacgtgatggtgttcgcgccgcagcgcgcgttcgacgtgcgcaccgatatcttctactacaaggtcattcagggcattgccgccgcgctgatggagcatgaggtgcgcatccgctactgcgggctggaagagcagcgcagcgacggcgcgctgtttctggaaaagatgagcgatccgcacaccgaagcggcgctgatcatcggcatcgacgacgagcatatccacaccctggcggccgatctgcacaaaccttgcgtgctgatcaactgcagcgatcggcagatgcggctggacagcgtctcgccggatcatcagttgatcggcgattactccgccagctacctgttccagcaggggcacagccatattctcaacctgcagtgtctgcgccgccacaccatggagctgcggctggcgggcatccggcaagcctacgcgcggcatcatctgccgttcgacgacggccgccatctggtcaccacctccggcttcggcagcgaagaggccgagcaggcgctgaccacctatctcgatggcatccacggccacgccccgctgccgacggcgatcctggccggcggcgattacatggcggtcggggcggtcaaggcgctcaacaagcgagggctgaacgtgccgggcgacgtgtcggtgatgagcaccgacggcttcaacctggcggaaatccatgacgtgccgctgacctcggtgcaggtgccgcgcgacgaactgggttacgaggcgatccaactgctgcagcggcgcatgctgcgcgccgacgcgccgccgtgcaacctgctgctgcacggccggctggcggtacgcgcctcggtgcggcgcatcagcccgcacaagactgcgccggcggtgagcacgcatgaccacaggctttatgacgagtaggctacacttaggcacagtgcattcattcgatgaggtaaaattttttgcctaaggagagccactatgccagcccagcgcatgcgttccgtcattcctccctacatgctgcgccgcatcattgaacacggcaacgccccgcagcgcgactgcgcgctgcacaccctgaaccacgtgcaaagcctgctcggcaacaagccgctgcgttcaccgaccgagaaaaacgcccgagccggcgaagcgctccgcgatatctacgacgcccagaacggcacccaactgcccggcaaacaggtgcgtaaagagggccagcccagcaaccacgacgtggcggtggacgaagcctacgactacctcggcgtcacctacgatttcttctggcaggcctaccgccgcaactcactggataaccaggggctgccgctggtcggcagcgtgcactacggcaaggagtaccagaacgctttctggaacggccagcagatggtgttcggcgacggcgacggcgagattttcaaccgtttcaccatcgccatcgacgtggtcggccacgagctggcgcacggcgtgaccgagagcgaagccgggctgatctactaccagcagtccggcgcgctcaacgaatcgctgtccgacgtgttcggttcgctggtcaagcagttccacctgcagcaaaccgccgataaagccgactggctgatcggcgccgggctgctcgccaagggcatcaaaggcaaagggctgcgctcgatgtcggcgcccggcaccgcctacgatgacccgctgctgggcaaagacccgcagcccgccagcatgaaggattatatccagaccaaggaagacaacggcggcgtgcacctcaactccggcatccccaaccgcgccttctacctggcggcgacggcgctgggcggcttcgcctgggagaaagccggctacgtctggtatgacacggtatgcgacaaagcgctgccgcaaaatgccgatttcgccaccttcgcccgcgccacggtgaaacatgcgcaagcgcgtttcgaccagagcgtggcggacaaggtgcagcaggcctggcatcaggtgggggtggaataatgaaaccgctgccgacgctcaatcaggatacggtcattgagctggcgcgcgagggaggcttcgcctacattcccaaactggcgggccagcgccgcatcgcgctggccgatatcacgccggagcagcggcagcgcctgaatcagctgctgaaccagacgctgccttatgcgcaggaagaaggccagcccaactcccccggctgcggcgaccaacgctactaccgcatacagatcaactacaccagccccaccctgagcaccgagatcgtgctgttaatcccggaaagcagcgcgccgcaggcgctggtggatctgtggaaaaccggccaggtggatgagtgagggcttacagcggctgatagctgaaattcacccgctttttggagatcagcccgtgcccgttctggcacaggtaatccaccgccccgcaggctttcaattcttgcagcggctgcccgcactccgggcagctcgccagctgccgataatcgcgctgacaggcggcacaatggtagtgacccgctacccaattcatggtctgacgacagtgcggacagtgcgcgtccataacgactcccaggttaaatcgcgccccatgagcgcaaaaaatagatccccaacgcggtggtgaagaacgaaccgacggtggtgatggcgataatattggccgccagcgtggcgttgccgcccatggcgcgcgtcatcacatagctgcccgaagcggtcggcgtggcggaaaacaggaagataatgcccagcgccgcgccctggaacccgcacagccagccggccagtgtcatcaggcacggcaccagaaacagcttggccgccgacgacagcgccgccacgttggacgaacggaacatggcgcgaaaatccaggctggctccggtgcaaagcagcgccagcggcagcgacagcgcggagatatagctgccggtttggcggatcacggccgggatccccagcccggtttgcgcatacgccagcccgcacaccagaccgatgatcagcgggttggtgacgatgctgcgcagcagcgacaggtggctgattttcttgccctgcccgccctgcagactgcgcgtgagggtgatgaccgacagtatattgaacaggatcaccgtcaccgtcaggtacagcgaggcgagcgcaatgccttcgctgccgtaggcggtcatggcgtaggccaggccgacgatggcggtattggcgcggaagccgccctgcacgaataccccgcgctcacgcggttctttcaccaaccacctggccgccagctccaaaagcaggaaggtcgccagcgtgccgaccgcgccgaacagcaccagcggcaggttgccgagcagctgcggatggttggtggcaatgctgaaaaacagcaggcacggcagcgccagattgaacaccaggcgggtcgcaccgtcgacgaagcggtcatccatcaggcgccaatggcgcagcaggatccccagcagcatcatcagcagattcggcacggtgacgttaaacgcaaaactccaggtttcccaggacatggtgttccttcaggcaggcgaggtaatcttcagataataaaacgatttcgggccaataaaaaagggcgcggcatcactgccgcgcccctcataagcgattacttgctctttttcaggtggctcatcaggcgcttgcgcttacgcatctgggttggcgtcagcaggttgcgtttgccggcgaacgggttgtccccctctttgaactggatgcggatcggcgtccccatcacgttcagcgagcggcggaagtagttcatcagatagcgtttgtacgaatcggacagatcgctgacctggttgccgtggatcaccacgatcggcgggttataaccgccggcatgggcatatttcagcttcacgcggcggccgcgcaccaacggcggctggtgatcgtcaaccgccatctgcatgattttggtcagcatcgaggtgtttacgcggcgggttgcgcattcgtaggcttcctgtaccgattcgaacaggttgccgacgccgctgccgtgcagggcggaaatgaagtgcacgcgcgcgaagtcgacgaagcccaggcgcagatcgagcatctctttcacgtgctcgcgatcttcttcgctcatgccgtcccacttgttgaccgcaatcaccagtgagcgcccactattgaggataaagccgagcagcgagaggtcctgatcggaaatgccttcacgcgcgtcgatcaccagcagcaccacgttggcgtcttcaatcgcctgcagggtcttgatcaccgagaatttttcgacggtttcggtcaccttgccgcgtttgcgcaccccggcggtgtcgatcagcacgtattcgcgttcgtcgcgcaccatcggaatgtagatgctgtcgcgggtggtgcccggcatgtcatacaccaccacgcgctcctcgccgaggatgcggttagtgagcgtagacttaccgacgttcgggcggccgacgatcgccagtttgatcggcagatcctgcggattgaacgcttcttccggctcttcgtcttcttcgccttccagcgtttcgccgttttgctcggcccagtaagcggcgttggcctcttcctcggtcagctcgacgtcttccggtttttccggcacgaacggcaccagcacgtgttcaatcagctgggtcacgccgcggccgtgagaagcggcgatagcgaacacttcacccaggccgagcgagtagaaatcggcggtggcggtgtccggatccagaccgtcggtcttgttggccaccaggaaggtcgccttctggcggctgcgcaggtgctgggcgatgccctgatccgccggcatcaggccggcgcgggcgtcgaccatgaacagcacgatgtccgcttcttcgatcgccagcagcgactgaccggccatgcgcgtttcgacgccgtcttcggtgccgtcgatgccgccggtatcgacgatgataaattcattgccttcgatttcagcacgaccatacttgcggtcacgcgtcagccccgggaaatccgccaccagcgcatcacgcgtatgggttaaacggttgaacaaggtggatttacccacattcgggcgcccgaccagcgcgacgacaggtatcattgttgaagcctcattacttaataatcaatgcgttactgcactgtggatagacaccagcggtgcagcttataaaatacgaaacggcccctgaacactcaggagccgttttccccttcatctttcgcgccacagcggcgttgtctgcgcaccctcgcctcggtcactcagttcactgagctcccgaggactcatgcgcttgccgcctggctgcaacccgaaagctttcgggtgcaagaagggtcacgacgagcggcgttagcgggtgaaagcgtaaactttcccgccgcgagcctggatgatcagcttgtcgctggccaccatcggcgcagacaggaagccggagctgtccacttcctgctgggcgacaaaacggccatcggtggtgttgatccagtgcagataaccttcggcgtcaccggtcaccagataaccattatacatcaccggcggcgtcaggttgcggtgcagcagatcgctctgcgtccacacggtcacgccgccttcggtgctgagtgccactacgcgatcgttctggtcgatcaggtagatgcggcccgcgtcgacgatgaaatcattcaccgaacccagctcgcgtttccagataatctggccggaacgcagatccagcgccgtcaggttgccgttgtaacccagcgcgtagaccacgccgtcaacgatcaccggcgtggtgtccacgtcgttcagacgatcgatttcggtcgcgccgctcggctgagaaatacgctgttgccagataatctggccctgctgcatcagcaccgcactgacgcggccgttgtcaccgccgacgatggcggcgccaaaagcgacggccggcgcggattcaccgcgcaacgacagcgaaggcatgtccaggttaaccgtccacttcaccgcgccgtcggcttcgttcagcgcctgcagcatgccgttggaggtgtgcaccaacaccatgccgtcgctgacaaccggacgggagatcgcttcgccggccactttggtctgccaggcgatggcgccgtcggcggtgttcaatgcgtaaaccaccgctttttcgctgccgacgtaaaccttgtcgcccgcaaccgtcaggccgcccgacagcagcgcagacaggttgctggagaagaagccggtcttctcggagagattgaccttccacttctcgttgccgctgtcggcgtccatcgctttcacgatgccaaagcgatcggcggcgtaaatggtgctgtcctgataggccgggcgcaggtgggagtaatactcaccgataccgtcgcccaccgaggtgctccacgccttgctcggcgtaaactgattttcaactttcggcaacggcgacatggtaaccacgtcttcttcgctgttaaacagcgagcaaccactcagcaaggcagcggaaaccagtccgaccaagagtgttttacgcaattgcatgggaattccccttagctggacaagttattcaatttcatgcgcagcagaacctgcagcgcctgagaagcattggactcaatgcctttgctgtaagcttcgcgcgcgcccttggcgtcgcccttggccagcaatacatcgccgcgcacatcctgcatcatcgccacccagccttcgcctttcacgccatccagcgttttcagcgcttcatccagctttttctcctgcagctggacgcgcgccagacgcaggtcgatcatcgccaacaggttgtcgtctttggtctggccctgcgccagcaccaattgttgttccgccttggcgaaatcattctgttcgacaaagtgcttggccaactgcagcgcggccagtacgccgtagctgttgccgttagcctggacaaatttctctgcggcagccacgtcatccggcttgccggccgccagacgatcgctggcttcctgataggattgcgatgccgccatcatgttggagttttcatggctctgccaataacgccagccaaccagggcaccaattccgagcaccacgcccaccgccagcgctttgccgttctcggcaaagaaccgacgcagtgcgtcgacttgttcgttttcagtggtatagacttccacggtgtccttctccttaacctaacatcaaagccagacgcgcagcgacttcgctttgcgccagcgtttcttgttcaccactgcgcaggtctttcaccaccacctgctgcgccgccacttcgctctcacccaggatcagcgcgatgcgcgcgccccatttgtccgcacgggtgatctgcttcttgaagttgccgccgccgtaattggtcatcagcttcagctgcggcgccgcgtcgcgcacctgttcagccagccgcattgccgcactctgggtgcccgcgccggaagaaatgacgtacacgtcgatagccgacggcgccttgaattccgggttgaccgcctgcaccagcagcaccagacgctccaggcccatggcgaaaccgaccgccggggtggcgcggccgcccagttgctcgaccaggccgtcgtaacggcctcccgcgcagacggtgccctgcgcgcccaggctggtggtcacccactcaaacacggtgcggttgtagtaatccagaccgcgcaccaggcgctcgttaacggtatatgggatacctgcctgcgccaaaagttcacacagaccggcgaagtgagcacgggattcttcatccaggtactcggacaggcgcggcgcgtcgttcagcagcgcctgcacctcaggattcttggagtccagcacgcgcagcgggttgctgtacatgcggcgtttgcagtcttcgtccagcacctcgacgtgctgctccaggaacgccaccagcgcgtcgcggtagttggcgcgcgcctccagcgaaccgatggagttcagctccagcgtgacgtgctcggcgatgcccagcgctttccaccagcgggcggtcagcaggatcagctcggcgtcgatatccgggccttgcaggccgaacacttccgcgcccagctgatggaactgacggtaacgccccttctgcgggcgctcgtagcggaacatcgggccgatgtaccacagacgctgttcctgattgtacagcagaccatgttcgatgccggcgcgcacgcagccagccgtcccttccggacgcagcgtcaggctttcgccgttgcggtcttcgaaggtatacatctctttttccacgacgtcggtcacttcgccgatcgcgcgtttgaataacggggtctgctctacaatcggcaaccggatttcgctgtaaccgtagccgcccagcacctgcttgagggtgccttcaatacgctgccataatgccgtttcttccggcaggtagtcgttcatgccgcgaatggcttgaatgttctttgccacgtgagttctctgtccgttgtctgtaaaaatgaacccgattatagggactttgccgcccggtattcaacgcggatgcggttttctgcccttcaggttcataaacaagcgggccaacaggcccgccgtgtagcgataacgcttatttttccagcaggttgaccgtgatgcgtttgctttcgtccatcatcgcggccttggcgcgaattttcgcttccagctggtcgatcatctgttcgttgtcgaaacgctctttctggcgcacgccgtcttcatagaagccgctcttcttgtggccgccggttacgcccatggtggacaccagcgcttcgcccggaccgttcaccacgcagccgatgatcgaaacgtccatcggcgtgatgatgtcttccaggcgctgctccagcgcgttcaccgtgccgatcacgtcgaactcctgacgcgagcaggtcgggcaggcgatgaagttgatgccgcgcgcgcggatgcgcagcgacttcaggatgtcgaaaccgaccttcacctcttcgaccggatccgccgccagcgagatgcgcagggtatcgccgatgccttcagacagcagcatgcccaggccgatggccgatttgaccgacccgctgcgcgcgccgccggcttcggtgatgcccaggtgcagcggctgatcgatgcgcgacgccagcaagcggtaggattgcaccgccaggaacacgtccgacgccttgacgctgaccttaaactggtcgaagttgaggcgatcgaggatgtcgacgtggcgcatggcggattccagcagcgcttccggcgtaggttcgccgtacttttcctgcaggtctttttccagcgagccgccgttgacgccgatgcgaatcgggatgttcttgtcacgggcgcagtccaccaccgagcgaatgcgcgattcgttgccgatgttgcccgggttgatgcgcaggcagtctacgccatattcggccacctgcagtgcgatgcgataatcgaagtggatatcggcgaccagcggcacgttgacctgctgcttgatcagtttgaacgcctcggcggcgtccatggttggaaccgaaacgcggacgatgtcgacgcccacgcgctccagcgctttgatctgattaaccgttgcttcaacatcggtggtacgggtgttggtcatcgactgcacggcaatcggcgcgccatcaccaataggcaccttgccgacgtaaatgcgtgtagattttcgacggttgatgggcgcttggttatgcattacttactctccattgctgctctgacatcacgaccggtgccgcgcgattactgcgcggcgacggtcaggcgagcaacacggtttgacttaacgaaccggcttaaatcaaccggtttaccctgatactggatctgaactgccgccggcgcaccgatggtcagtttatacggcgcagtgccggtcaggttcagcttgccgccttgcttctgggtgccgctgaacagcgttttaccgctcgcgtcggtcacctgcagccagcagtcggcggagaaatccatcaccagcgcgttcggatcggccgccggcgcagccacgcccgcatcggcggtcggcaacggcgcttgcgccgccggcgcggtttccggcagggtggtctggcttggcgacaccacggcaggctgctgctgagccgcgctcggcgcctgggcggtcgccgccggcgcctgagccgctgcgccggtatcggccggcgcggcgctgttgtcggtcaacggcacgttggtgccggcgtcggcattgccgtcggtcagcggcacggactgcccttcgttattctgtgaaagctgcgccgaggattgatcggccatggtggcgatctcttcctgctgcgccttgtggttttgccaccaccaggcgccggtcaggccgatcaccacgaacacgataagccaggtgaagctcatcagccagccgtcgcgtttcttgcggcgcttgcccagcgagaaactttgcatcggcgccactttcgccatcttcaacggcgcctgcttggccaacatcggcagcagttcgtcttccggcagatgcaccagcttggcgtaggaacggatgtagccgcgcacgaaggtggacgcgaggtcagcggacacgctgtcttcctcgatatcgcgcacggtggacattttgagacacaggcgttctgcaacggtctgttggctcagcccgagttgctcacgggcctgacgcaggcgctggcccgtcgtcatggatacggttttatcttgggaggcttcagtattcattagctaagaactgctggtactgtttggattgtggaaaacttcgcgctagctgcttgccatagcgttgaacgctatcctggcggccggctaacgcggcgaaacgaatctgtaaccataagctgctggcgctggccggcagaacatgctgataaacatccaataaaagttgcgactgggcgcgcttcccttctccaaattgcttttcggcctccgccagcagcggagcgcctttgtccggatcgactttcagcgcgcggctcaacagcgtgcgcgcttcgtcgttttgtccggccttgagaaaacagtaacctgcgttttccaggctgtcggcgacctggccataatcgggcgccagcgccgcagcgctaaactgctgttgcgccggtacatactgccctaaaccgcaaagaaacgcaccgtaattattcagtacggtgccattgcccggcgcaagtttgagcgcttgccgataacgctgttcggcctcggcgttttcaccgctgcgctgcgcgtagagcgccatgcccaactgcgtgcggtaatcctgcggggccgcgtccagcgccttttccaggttctggcgcgcggcgtccatgtcgccttgctgcaggtactccagccccagctgcaggcgcgtctggcccgcctcagagacctgtgcttccttttccggcgctgaaccggaacacccggccaacaacccggccgccagccacataccccacagtttcagcttcatgcccgcattcatttccttatcggccgtcagctaacgcccgccagcgacacgctttcgcataacaggctgttagataacaaaaaatggtgctataggattcagaccgcccgtacgttgataggttccccggccattttcttcttcagggtacgcttggtacggtcgatcacttcacccgccagttgcccgcaggcggcgtcgatatcgtcaccacgggttttacgaacaatagtcgtaaagccgtattccatcaacaccttggagaaacgatccacccggctgttggagctgcggccgtacggagcgcccgggaacgggttccatgggatcaggttgatcttgcacggcgtgtctttcagcacttccgccagctgatgcgcgtcgtcggtgctgtcgttgatatgatccagcatcacgtactcgacggtaacgcggccctggttggcgttggatttctccaggtagcgacgcaccgcggacaggaaggtctcgatgttgtacttgcggttgatcggcacgatctcatcgcggatggtgtcgttcggtgcgtgcagcgaaatggccagcgccacgtcgatcatgtcgcccagcttgtccagcgccggcaccacgccggaggtagacagggtcacgcggcgtttggacaggccaaagccgaaatcgtccagcatgatttccatcgccggcaccacgttgttcaggttgagcagcggctcgcccatgcccatcatcaccacgttggtgatcgggcgttggccggtcaccttcagcgcgccgatgatcttcgccgcgcgccacacctggccgatgatttccgacacgcgcaggttgcggttgaagccctgctgcgccgtcgaacagaatttgcactccagcgcgcagcctacctgcgaggagacgcacagcgtcgcgcggtcggcttccgggatatacacggtttcgacctgctgatcgcccaccttgatcgcccacttgatggtgccgtcggccgaacgctgttcttccgccacttccggcgcgcggatttccgctacgcgctgcagcttgccgcgcaggactttgttgatgtcggtcatctgctcgaaatcgtcgcagcagtagtggtaaatccacttcatcacttgatcggcgcggaacggtttttcgcccatttcggcgaagaactcgcgcatttgctggcggttcagatccagcaggttgattttggccgcagccggttgctccacgttaacggagggggtagtcagcgaattattttcagacacggtgtgctcggacgtgatgggttctaacataatgatctctggcctcgttattacacgttatggcgctaaagaatggaaagtaagttgtgcatttcagcccgcgagattcgggtggcggcactaaaaacacgcccctgacaagtcgtcttatcaggggcgcggcattgtacaaattttagtagcgggtttctatggctgaaaggcattcagggcatttttattgtttcagccggtgaatgcctggctatcagctcagaaacggcacgattaacgtgcgcagatttcgctttcgttgaagaagtaagcgatttcacgctgtgcggattcaacggagtcggaaccgtgaacggcgttagcggtgaagctgtccgcgtagtcggcgcgcagggtgccggccagtgcgttgtccgggttggttgcgcccatgatgtcgcggttgcgctgcacggcgttttcagattccagaacctgcaccatgattgggccggaggtcatgaactctaccagaccgtcgaagaatgggcggcctttgtgctcagcgtagaagccttcagcttgctcgcgagtcagacgcagcattttagcggcgatgattttgaaaccggcgcgctcgaaacgcgcgtagatagcgccgatgtcgttgttggctacagcgtttggtttaacgatggaaaaggtacgttctacggtcatgatggcctctgtatgacttccaaaacaggccggtctgcaatgttgccggccttctcaagtggcgcagattatatgtgcgccgttaacgcttgcctacgggaaaatcaacatttcattaaaaaaatatgatcttcattcgccactttcagcggcgcaccgacgttattgggtcttgtcggtagacgggatcacattgcgcagccaactgccccagcggcgctgataaaacggctgcgtatgggcgatcaggtagtggctgatgccccgctctttctccgataccaggcagaaatccaccggttcgtcattcggcgccgtttcgctggcgacgctgccggcctcgttgatcaacgcctcgatctccgccggctcggcatccacttccagcccgatcagcagattcggcttctcgtccgccgcctggtcgtgcatcagcgccagaaacgcgcggcgcaccggcttgcgctggctgaacagcgtggtcagcgcatccaccatcgccgacggatactcttcgggctgccccagcaggatttgggtctctttgtcgacgtagtgctccaccggtttgacgacgccgccggtcgccagcagcatcgccacctcttccgggtagaactctttgccgtattccgccttcgggttgaggaacagatccgcgccctgggtgatttcaaacagcacccgcgccggcatggcgatgaacggctgttcatcctcaacggccttctgcagcgcttccagcgaggtgaagaacggaataatgctgccgccgtcctgtttttcccaatgctggatattgaccggcgtatccgcgttcagcgtaatgtcgccgtcctgctgcacctgctcgctgtcgccgaggatcagcaccgtggcctcgagcagttcacggaagaacgccgggcggtgggccggctccgtcaccgccagcttcagcaggcgttcaagttcgttctcgctcggggcggcatcgtgatgatgggcactcatggcaaactccagggatcaaatagcgaggcccagcatgctgggccccgaagataatgcgcattctagcgcccgacgcggcgggcgttcaattatttggctttgctcagcaacagattggccagggtgcgcacgcccaaaccggtcgcgccggccgaccactgatccaccgcgcctttgcggtaggtggcggaacagtcgatgtgcaaccagccttgctggtagttcttaacgaaatgcgacaggaaggccgccgcggtgctggcaccggcggtataggccgggccggccacgttgttcagctcggcgaagttggacggcagctggctgcggtggaactcggccagcggcagacgccagaacggctcgtgctcggcggcggcgctgctcagcagctcctgcgccagcgcgtcgtcaaagctgaacagcgcgtgatagtcgttgcctaccgccgttttcgccgcgccggtcagggtggcgcagtcgataatcagctgcgggttctgctcagaagcgtcgatcaggccgtcggccagcaccaggcgcccttccgcatcggtgttcatcacctcaacggttttgccgttgcggtagcgaatgatgtcgcccagtttgaaggcgttgccgctgaccatgttgtcggcgcagcacaggtacagcttcacgcgctgcttcaggccgcgcgccgccgccagcgccagggcgccggtgatggtggccgcgccgcccatgtcggatttcatcgaatccataaaggcgctttgcttcaggctgtagccgccgctgtcgaaggtgatgcccttgccgaccaggcatgcgaacaccggcgcatccgggttgccggtcgggttgaagtccaatgccagcagcaccggcgggcgctcggagccgcggccgacggtgtggatgccggcatagttctgctcgcgcagatcttcgcccttggtgatgcggtagctgacggcatcgcagccgacgtcgcacatcagatcgacggcgcgggtcgccaattgctccggccccagctcttccgccggcatgttgatggtgtcgcgcacccagtcgacgatcttcaggcgcttatccagttcctgacgcgcggcttccggcagctcgggccattcgacgttgcgctgccctttcggcccgcgatagccttgccagaacgcccagctgttttccaaatcccaaccgtcgccggccagcttgacgtttttgatgccctggccatcaattttgcggcccgcgcgctggatcgcgcccagcttgtcggcgccggtcaggtggatggtcattccttcgccgttggtgctcagcagcgctttttcgccccagcgggcgtcggcaggttgttgcgacagcgtgacctgcatgaattctgttgtcatagccttcttactccggattattcttttattaatcttgtcggatacaaaataaacgggccgcccatggcagcccgttacgctatttactccgcttcatctaaccagaccagcaggatcgcttccagtattttttcgttggaagcctgcggatcgtcatcgaactcttccagatcgcagatccactgatgcatgtcggtaaaacgcacggttttcggatcggtatccgggtattggtcgtacagggcttcgccgatttcacggctgtcggtccacttcagtcccattatgatctccgggttgatgctgcggctaacaattaatgctcacgcgcgtggttgacggtgtagcgcggcatttcgaccaccagatcttcgtcggcgaccagcgcctggcagctcagacggctttccggctccagcccccacgctttgtccagcatgtcgtcttccagctcgctgctctcttccagcgaatcgaagccttcacgcacgatgcagtggcaggtggtgcaggcgcaggatttctcgcaggcgtgctcgatttcaatgccgttgcgcagcgcaacgttgaggatcgactcccctttttcggcttccagaaccgccccttccgggcaaagatcttgatggggcaggaaaacaattttaggcatggttaaacctcatccacagaatggccagccagcgcgcggcgaatggaagcgtccatgcggcgcgcggcaaaatcttgcgtttgtgcatctaatgttttgatggcgtcttcgatagcggcgggatcttcaccctgcgccgcctgctgcaacgcctgggtcgcggcggcgatcgcctggctttccgcctcgctcagcagcgcggcgtcggtggccagcgcgccctgcaggctttccagcacccgcgcagcttccacgcgttgctccgccagcttgcgcgcgcccacgtcgctttgcgcattggccatcgaatccttgatcatgccggcgatttcactgtccgacaggccatacgacggcttgacctggatcgaggcttcaacgccggtggatttctccatcgcggtgacgctcagcaggccgtcggcatccacctggaaggtgacgcgaatgtgcgcgcccccggcaggcagcggcggcaggccgcgcagcgtaaagcgcgccagcgaacggcaatcctgcaccagctcgcgctcgccctgcagcacgtggatcatcatcgcgctctggccgtctttaaaggtggtgaactcctgcgcgcgcgccaccgggatagtggtgttgcgcgggatcactttctccaccaggccgcccatggtttcgaggcccagcgacagcgggatcacgtccagcagcagcatatcgctgtccggcttgttgcccaccaggatgtcggcctggatcgcggcgccgatggcgaccactttatccggatcgatcgacgtcagcggcgtgcggccgaagaaggcgcccacttgctcacgcaccaacggcacgcgggtggaaccgccgaccatcaccacttccagcacctcgtcggcggcgacgccggcgtctttcagcgcccggcggcaagccatcagcgtgcgtttcaccaacggagcgatcagcgcttcaaactgggcgcgggtcacctcgccctgccagccggccacctcgacgcgcacgctgtcggcatcgctcaacgcgattttggcggcgatggcggcatccagcagttgacgctgcacgccgtggtcgctgcgatcggccacgccggcctgctcgcgcagccagtcggccaacagatgatcgaagtcgtcgccgcccagcgcggaatcgccgccggtggccagcacttcgaacacgccgcggctgaggcgcagaatggagatatcaaaggtgccgccgcccagatcgtaaaccgcgatcaccccttcctggccggaatccagcccgtaggcgatcgccgccgcggtcggttcgttcaacaggcgcagaacgtgcaagccggccagacgcgctgcgtctttggtgccctggcgctgcgcgtcgtcgaagtaggcgggaacggtgatcaccacgccatccagctcgccttccagcgccgcttgcgcgcgcgcggacagggcccgcaggatatcagcggagacaccgaccgggttaaccgggccggcggcggtgacgatcagcggcaggccgttgtcgctggcctgaaattgatacggcaggttcgggtaacgttgctgcacatccgccaacgagcggcccatcatgcgtttgatggagctgacggtattggccggatcctgcgccgcctgttggcgcgcctcccagccgacgcgctgcgcgtccgcctgataatgcaccaccgaaggcagcaaatggcgcccctgttcgtcggccagcgtttccgcctgcccgctgcgcaccgtggcgaccaacgagttggtggtgcctaagtcgatgccggcggccaagcgtcgctggtgcggcgcggcgctgaggccaggctcactaatttgtaataaggccatgttgaagcttccacaatcagaatcagaaggtgttactcaaaacccagcagtttttcttcgagttgttcaacctgttgctggagtttgtccaaaaagcgcagcttgcgcacggtgtcggcggcgtccgcccactgctcactgtccaactgctgcagcatcagcgcgctgcgctgtttgatggagacggccagccgcgcgccgaaatcggccagcaggctttccgcctccggcttgcgctcaatggcgtcgagctcttcgcgcagttccagctgttccatcaggaacgcggtgtcgcgcatcgtatgctgttcgttgcccagatcgaagccgtgcaaagatagcatatactccgcgcgttttaacgggtgcttcagcgcctggtaggcttcgttgatggtcgccgcctgctgcaacgccatcaggcgttcgcgctccggctggttggcgaaacgatcggggtggaattggcgttgcagatcctggaagcgggacgcaagcaggctgccgtccacggtgtagcgaactggcagcccgaataaagtaaagtaatccatagcgtgctctgggcgttagcggatgaagttcccccgccgaaacgggggagcacgatggactgtcagacgttgaaactctcgccgcagccgcactcgcttgagacgttcgggttgttgaacttgaagccttcgttcaggccttccttaacgaaatcaagctcggtgccgtcaaggtagaccaggctcttgccgtcgatgatcaccttgatgcctttgtcttcaaacacgatgtcgtcatcgttggcttcgtcaacaaattccagcacgtacgccatcccggagcagccggaagttcgcactcccagacgcaggccgagacctttgccgcggttcgtcaaaaacgcctgaacacgctgcgcagcgctgtcgctcatggtaatagacatcacaacctcacacttcacatcaaagcccggcgcggccgggccgactcagacaaattacttggcgctatgcttgctcttatagtcggcaatcgctgctttgatggcgtcttcagccaggatcgagcagtgaattttgaccggcggcaattccagctcttcggcgatctgggtgtttttgatcgcttcagcctgatccagcgacttgcctttcatccattcggtcaccagcgagctggaggcgatggcggaaccgcagccgtaagttttaaagcgcgcgtcttcgatgatgccttcatcgttaaccttgatttgcagcttcatcacgtcgccgcaagccggcgcccctaccatgccactgccgacggtaggatcttcgttgtcgaaagaacccacgttgcgcgggttttcataatgatcgattactttttcgctgtaagccatgaccttgctcctgaaacctgagaattaatgatgcgcccattcgatgctgttgatgtccacgccctgcttgaacatctcccacagcggggacagatcgcgcagacggccgatggatttacgcaccagttgaatggtgtagtcgatctcttcttccgtggtgaaacgccccagggagaaacggatcgagctgtgcgccaattcatcgctcatgcccagcgcgcgcaacacgtaggacggctcgaggctggcggaggtacaggctgaaccggaagaaacggccaggtctttcagcgccatgatcagcgactcgccttcaacgtagttgaagctgacgttcaggatgttcggtgcgccgtgctccagatcgccgttcagatacacttcttccatatctttcacgccgttccacagacggtcacgcagagtgcgcagacgcgccatctcttcggtcatctcttctttggcgatgcgataagcttcgcccatgccgacgatctggtggacaggcagggtgccggaacgcatgccgcgctcgtgaccgccgccgtgtacctgcgcttcgatgcggatgcgcggcttgcggcgcacgtacagcgcgccgatgcctttcgggccatagattttgtggccggagaacgacatcaggtcgactttcagcttgctcagatcgataggcagtttgcccacgctctgggtggcgtcaacgtggtagatgataccgcgcgcgcggcacatttcgccgatcgcttcgatgtcctgcaccacgccgatttcgttgttgacgtgcatgatggagaccagaatggtgtcatcgcgcatcgcggcttcgagatcctgcaggctgatgatgccgttgctctgcggcgccaggtaggtcacttcaaacccttcgcgctccagctgacggcaggtgtcgagcacggctttgtgttcggttttgctggtgatgatgtgcttgccttttttctggtagaaattggcagcgcctttgatcgccaggttgtcggattcggtcgccccggaggtgaagacgatttcgcgcgggtcagcgcccaccagttcggcgatttggttacgggcgatgtctaccgcctcttccgcctgccaaccaaaacggtgggaacgggaagccgggttgccgaaagtgccgtccagggtcaaaaactgcatcatcttctcagcaacgcgcgggtcaaccggagtcgttgctgagtaatccagataaatcggtaatttcattgctcttgtgctccgtacatcacttccaaaaactaaaataatttcgccagctgcttatgcgcgcagattaacgttgatagtttcttgcggacggccgttggccgtgcggcgcgtatcgttgttttgacgatccgccaccaccagcacttcctggttgttgaccagttctgccagcgtaatattgttcaggaacccgctgatgcgctcgctcagatcgcgccacagggcgtgggtcaagcagcgatcgccgccctgacagccttctttgccctggcaacgggttgcatctaccgattcatcgacagcagtgatgacagcgccaacggcgatctcacccgcgtctttacccagcagataaccaccgcccggaccgcgcacgctggccaccaggccattcttgcgcagacgggagaataattgttccagataagagagcgaaataccctggcgttcggaaatgtccgccagtggcaccggcccttcctgagaatgcagcgctacgtcgagcatagcggttacggcataacggcctttggatgtcagtctcatagctcaatggttacctgttggtcaaatatggccgaaagtctgacattcccgagtaaaacagtcaactatttaacccagtaattaactcaagtattagcacgttttgaacttagcaagaacaaaggtatataaaatacatgttataacctttggataactaatactattgtcgcccaccgtgatgccacatcaattaattaccttgatgtttatcctgtttctcgatcgacgtcagcatgccgcgcaggatattcagctcctgcccttccgggcgcgcgcgggtgaacagccgacgcagacggttcatcacctggcccggatgcgacgggcgaatgaaaccggtgcgctgcagcgtctgctccagatgctgatagaaacgctcgaggtcgtccaccagcggatacggtgtctcttccagctgcggcgcgcctgcctgttggcgatcgaggtaagccacgcgcacttcgtacgccaggatctgcaccgccatcgccaggttcagcgagctgtagtccgggttggccggaatggcgacgtggtagtggcacttttgcaattcatcgttggtcagcccgacgcgttcgcggccgaacaccagcgccaccggcgcgtgctcgccttcgtgcaccgcgcgcacgccgcattcgcgcggctccagcatcggccacggcaaggtgcgagaacgtgcgctggtacccaccaccaggctgcagccggcgatggcgtcatcgagggtatcgacgatagtggcgttgccgatcacgtcgctggcgccggcggccagggcgatggcctgagaatcgggtttgatcagcggattaaccagataaaggttggttaaacccatggttttcatggctctggcggtcgagcccatgttgccggtatgtgaagtctctaccagaacaatgcggatattgtgcagcatacaaactctgagcgtggcggaaaatcgcagcatcttaacacagccgtaggcaatttgccgaacagctgctatacttcgcgccgtttcctgttctttaacatcctagttggaagatacccatgcatccgatgctgactatcgccgtgcgcgctgcgcgcaaggccggtaacctgattgccaaaaactacgaaaccccggacgctgtagaagcgagccagaaagggaccaatgacttcgtcaccaacgtcgatcgcgatgcagagcatctgatcatcgacgtcatccgcaagtcttatccgcaacacagtatcgtgagcgaagaacgcggtgagctgatcggcgaagatcgcgatgtgcaatgggtgatcgatccactggatggcactgcaaacttcatcaaacgcttccctcatttctccgtttccatcgccgtacgcatcaaaggccgtactgaagtggccgtggtttacgatccaatgcgcaacgaactgttcaccgccacgcgcggccagggcgcacagctcaacggttaccgtctgcgcggcaccaacgccaaagatctggatggcaccatcctggcgaccggcttcccgttcaaagtcaaacagcacgccacgccttacatcaacatcgtcggcaaactgttcacccagtgcgcggacttccgccgcaccggttccgctgcgctggatctggcctatgtcgccgccggccgcgtggacggtttcttcgaaatcggcctgaagccgtgggacttcgccgcaggcgaactgctggtacgtgaagccggcggcctggtcaccgacttcgtcggcggccacaaccacttcagctccggcaacgtggtcgcaggcaacccgcgcgtggtgaaagccatgctggccaccatgcgtgaagaactgagcgaagcgctgaagcgttaatcgccagaagcgaatcgaaaaaaagcgctgccgatgcagcgctttttttatgcccgttagcgggagaaggggcggataccgccgccgaattccggctgcgcgctgacgtacagcaacagcccggcggccaacaggatcagccccccggccagcgccaacgccccccaggctaccgcgctccaggcggcgggcgcgcgcgaacggctgaggcgcaccgccagccggcggctgtaatgcaccagcagcgccagcatggagatggtcaacgaggtgccgaacgccatcgccagcgcggaaagcacgccccagccgaacacgccgatcaccttggagaacagcagcaccaaaatcgcccccgagcaggggcgcatgcccatcgccagcacgatggcggttcgggtgcgccagtcgctccccgcctgcagctcgctgtcgctcggcagatgccggtggccgcagccgcagtcggcgctgtgcacatgatcagccgccagcggcgtcaggctgttgatgcgcagcgccggcgccgggcgcatcgctttgatcgccgcaaacagacgtttcagcgcgcgccagctcagcagcacgccaagcagcatcaccagaataaaactgcccttctccagccaaaagctgctttggtgcagctggcgcgaagagagctgcaacaccaccagcatcaacgtcaccagcgcgatcgccaccagcccctgcaccagcgaagcggcgaaggtcagcttcaggctgcttttcagccgcgccgggtgggtggccagataggtggcgatcaccactttaccgtggccgggcccaagcgcatgcaaaacgccataaccgaggctgaacagcatcagcgccagcccggcctgctgcggcgcggccttcacctgctgcaacagccccgccatctgttgatgcagcgctttttgccataccacgctctgcatcagcagctgcggccagtagtgccacgccagcaacgcggcggccatcagcgccagcgtgaacggcagcagcggccacaggccaaaggcccaatggcgtcggcttatcgtcggcggcgagaaatttagcgacattgcagcgtcacccgctgggcaaactgttgccccagcgccaggtcttcgccgggcgagtcgttcttgtcgagcgacagcgcataggcctgcagcgacgcattcggcttcggcgtgatcagcttgtagctgcactgctgcgccatctccggcggcaaatgcagcgcattttggtctttataggtcatatccacgaaataagtcggatcgtaagtagaaagctcgaacggcttgcccgccagcggctgcggctcggccaacggcagcacgaactccagcaccgcctggttgccctggcgcgacaggtgatattcgctgggcaagttcaggtatttcaccggcttgccgtcgcggtaaagatcggtgaaatagtgctgccccagcacgttggccatcacttccgccgccagctttttccacacttccgaatcgctcttggcgtttttcgcatcgtagagcagatccgccgaggtgatttcatccatcacccacaccattttcaggccgaccagccgctggtccttggcgacgaaggtggtgttcatgtcgataaagctgtgcggatgagcggccgctccagcgctgaacacggcgccgagggcagccaaaagacgacgtaacttcatcattatcctgtcttacctgcatttgttataacgtaacacaaataactgccgaacggcccgcctctcccggcgatatttgtgacgaaagttgtaagccgaagtaaaagccgcgctgtcatcctgacgttacaaagccttttgctatgcttaggcataatcgcaaccttttatgccggaaggtgacaatgagcctggacacctctcccgtgcccgagctctccggacaacaacggcgctgtcatctgctgctgatgctgtacacgccggagcccgagttacagctggagaccttaagccgaatcaatggcgtcgcccccccgataacccggcaagatatagccgaggtggccagtgaaatccagcgtttccatcacctggagatcgccgtcgatcccgaccatggctaccaacttcggggcagcgcgctcgaccaacgcctgtgcctgatccattggctgcggcgggccctgcgctgcagcccgcagttcgtcgaaagcgacttcgccccgcgcctgcggctggcgctggcggccgatgccgggtcggcgtcgcagctggctcaagcgatagacgcctgcgagccgctgctcaaccgccacttcgacgcgcgcgaccgccaattcctgcagcattatctgctctactgcgcctggcaaaatcgcctgcagcagcatccgcgtttcgacgccgttcagcgcgactggctgcggcaaaagccggaacagcaagccgccgcctggctgcatcaggcctgcaaccggctgtttaaccagccgccgcaggctgacgagcgcgattttttggcgctgaccttcaccctgttgaaaaatcacagctaccacagcaatgactcggcgcaagagcagcggttgatggcggcgatcggcagcatggtcgagcgtttccagcaactttccggtatggccttcagcagcaaggccgagctggtcagccagctgttcgctcacctggcgccggcgctggagcgctgccgtttcgccatcggcatcgacaatatgctgctggaagacgtggtgcgcaaatacccgcggctgatgcgcaccacgcaggaagcgctgaaaccgctggagcaggagtacggcgtgcatttttccaacgaggaggcgggcctggtggccatcagcttcggcgcctggctgatgcaggacaacgcgctgcaggaaaaacaggtgctgctgctgacgctggacaatccgcagctggaagaggaagtggaatatcagatccgcgagctcacgctgctgccgctgaacatcaagtatctgccgctgagcgactatctgcgcggcggcgcgccgcagggcgtcacgctggtgatcaccccttatgcggcggtgcacaacgatccgcccccgccgctgatctataccgaactgccgctggaaacccggcagcgccaggccattcgcgcgctgctggaagcgccttaatcaacggctgacgctgaccgccggcggccggatgaacaaagccggcgccgcgaccgccgccatcacccagaataccccgccctgccaatgttcgaacaggaacccggcaatcaccgtcatgacggcgataccgccgcccatcgccaacgccgaatacaccgcctgcagccagatcacctcttgcccctgacgcgcggcgataaagcgcatcgccgccagatggcagacggtgaaggtgccgcagtgcaggatctggatcagcagcagccaacccagctcggtgctgtaggccatcaggctccagcgcaacacgccgcagcaggcggagagcagcagcaggttgcgcgcattccagcggcggaacagcacgttgctgctggcgaaaataatcacctccgccaccacgcccagcgaccacagataaccgatggtcgaggccgaatagcccgcctcctgccagtaaatggagccgaagctgtagtaaccggcgtgcgccccctgcagcagcgtgacgcacagcaggaagcgccacaccggcccctctttcaacagcgcccacagcgaacgctcggctccgccgtgcgtgcgcgcttcgccctgcggcatcacgctcggcttcagcaacatgcccagcagcatcgccagcacgctgaagatcaggctgtagagaatggcgttatggccccacaccgccaccagctgcccggtcagcgccgagccgatgacgaacgccagcgagccccacagccgcacccggccgtagtccatgcggatttgcttttgccaggtggcggccagcgcgtcggtcaatggcaccagcggcgagaagaacaggttgaaccccgctatcaccagcatcagccagccccagccgttgccgaagcagaagccaaccgcgaaagccagggtcagcagcgccagcaagcgcaaggcggagaccagatgagagggatctttaacgcgcggagcaatcagtaaactgccgaggaagcgggccaccaaaccggcgcctagcaacatgccgatggtttcgggcgcgatgccctcgcctttcagccacacgccccagaacggtaagaagatgccgtaggaaaagaagtaggtgaaataactgagcgcgagccaacgcgtggattgcagaaccatgatccctccggtgtgagggcaatactttgacagagctcacaccggcccgcaatcttcattccacttcaatgcgttagagtgccagacagctcacagtttgccgcaagcggccataaaaaaacccgccgcagcgggttttgtcaggcgaaagcgggattaggcgtaaaccggcaggcgggcgcagatatccagcactttcttcttggtgcgttcgatggtggcttcatcgttgatgttgtccagcacatcacagatccaaccggccagttcgcgcacgtcggcttctttgaagccgcgacgggtcacggccggggtgccgatacgcacgccggaggtaacgaacgggctcttcggatcgttcggcacgctgtttttgttgacggtgatgttggcgcggcccagggcggcgtcagcttctttaccggtcaggttcttgtcgaccagatccagcaggaacaggtggttatgggtgccgccggagaccactttatagccgcgctgcaggaacacttccaccatcgccttggcgttgaccgccacttgctgctggtaaaccttgaactcaggctccatcgcttctttcagcgccaccgccttgccggcgatcacgtgcatcagcgggccgccctggccgccagggaacacggcggagttcagcttcttgtacagctcttcgtcgccgcccttcgccaggatcaggccgccgcgcgggcccgccagggttttgtgggtggtagtggtgacgatgtgcgcgtgcggcaccgggttcgggtacacgccggcggcgatcaggccggccacgtgcgccatgtcgacgaacagataagcgccgatgctgtcggcgatttcgcgcattttggcccagtcaaccacgccggagtaggcggagaagccgccgatgatcattttcggcttgtgggtttgcgcctgtttggccagatcgtcatagtcgatttgacctttgtcgtcgatgccgtaaggcaccacgttatacagtttgccggacaggttaaccggggaaccgtgggtcaggtggccgccgtgcgccaggttcatgcccagaatggtgtcgcccggctgcagcagcgcggtgtacacggcgaagttagcctgggagccggagtgcggctgcacgttggcgtaatcggcgccgaacaattctttggcgcggtcgatagccagctgctcaacgatatccacgtattcgcagccgccgtagtaacgcttgcccggatagccttcagcgtatttgttggtcagctgggaaccctgagcctgcattacgcgcgggctggtgtagttctcagacgcgatcagctcgatgtgctcttcctgacgcaccacttcctgctccatggcacgccacagttccgcatcgtaatcggcaatgttcatttcacgctttaacatccggcatctcctgacttaaatcagctaactaaaaaatcaccaaataactacccgtttggggtctgggccacagtgtaaaccgtttcgccctaccgaagataggtcttgacagaggtttttacgcaaacgattggcataaggcggcgcaaggctttgatccgcgaaacgctgccgtttatcaacggacatttcctcatgcgaacaatgcgcttttttcatgttctgtgagcccgatcgacgcccgaagaacaccgcaacgaaaacaagggtatttacaagcggcgcggaacccaataagatgcatttaaaatgcatcattaaaattctcgtcaagatcccaacccaaggagcgctcccatgctggatagccaaaccatcgccaccgtgaaatccaccatccccctgctggcagcaaccgggccgaagctgaccgcccacttttacgatcgcatgttcgcccacaacccggaattgaaagacattttcaatatgagcaatcagcgcaacggcgatcagcgtcaggcgctgttcgacgccatctgcgcctatgccgccaacatcgagaacctggcggcgctgctgccggcggtggaacgcatcgcgcagaagcacaccagcttcaatattcagccggagcagtaccaaatcgtcggcgggcacctgctggcgacgctggacgaaatgttcagcccgggtcaggaagtgttggacgcctggggcaaagcctacggcgtgctggccaacgtgtttattcagcgtgaagagcagatttatcagcagagcgaaaccgacaacggcggctggcgcgatctgcgcgcattccgcattctgaagaagcagccgcagagcgacgtgatctgcagcttcgtgctggcgccggtggacggcggccgggtggcggacttcaaaccggggcaatacctggcggtctacatcaagcacgacagcctggaacatcaggaaattcgccagtactcgctgaccacctcgccgaacggcgagttctaccgcatcgcggtgaagcgtgaagatcagggtaaagtgtccaactacctgcaccagcaggcgcaggaaggcgacgtgatcgacatcgccccgccgcacggcgacttcttcctcgacgtgacgccgaccacgccggtggcgctgatctccgccggcgtcggccaaaccccaatgctcggcatgctcaacagcctgcacgacagccaacatcaggcgcaggtccactggctgcacgcggcggaaaacggcagcgtgcacgcctttgccgaggaagtggcggatattgccgggcgcatgccgaatctgagccgccatgtgtggtaccgcgagccgggcgccgatgacgtggaaggccgcgactaccacagccgcggattgatggatttgagcgcgctgcaaggcagcctggccgatccgcaaatgcactattacttctgcggcccggtggccttcatgcagttcgtgggcaaacagctgttggagatgggcgtagaggccgaacgcatccactacgaatgcttcggcccgcataaggtgctgtaatgcgtgcggagcgcggccgtcagaccgcgctcccccttcatttctcctgcagttggcgcgcgtcctgcacctgctgcaccgtcaccggcgccgcctggttgccccagcttccccgcagatagctcatcagatcggccgcttgacgatcgttcaacgcccagccataagccggcatgtcgaacgccatcgcctgctgcgtgatcggcgtatgcgccccttccagcaccacccgcagcgcggtcagcggattatccgccgttaccgtggcattgcctgccagcgccggaatggcgaagtcggtgccctcccccttattgccgtggcaggtcgagcagtacatcgcataggtcgccttgccgcccgaattatccgcctgcgcagcagatgaagcaggtttggcggcggtgtccggcgccaggctgcgcaggtacaccgcgatggcgttcagatcgccgtcgctgaggtactgcgtgctgtgggtcaccacctcgctcattggcccggcgaccgccgcatggcggctgcggccggttttcagcagcgccgtcacctcttccggcggcaggccgcgcagattggaggcgtaccagccgtccagctcggcgccgctcaggaacaccggctccttaccgtccaggcccttctcctgcatcgcccagccgcgcggcgtgtggcagctgccgcaatggcctgcgccttgcaccagataggcgccgcggttccactcggcgctttgctgcggatctgcctgatacggctgggcgtcgtgggacagcgagttccacaccgccagcggccagcgcatcgacagcggccaagtgatgtcgctgtcgcggttggcgacgttctgcgccggcacctcgttcatcagatagtcatacagcgcgcgcatgtcttccgcgctcattttggcgtacgaggtgtacggcatcgccggataaagccggtgaccgtctttggcgatcccctgacgcatggcgcgatcgaactcttcgaatgagtaagcgccgatgccgtgcagcttgtccggcgtgatgttggtggcgtagatagccccgagcggcgtcgggaacttcatgccgcccgccaattcggcgccgcccggcgcggtatggcaggcggtgcagtcaccggctttggcgacgtattccccggccgacatcgcctgggccgagccgccggcggccagcaggctcaacaggctcaacaggtacagtgaacgcagactcatgctccctccttggcggcaaccttgccgtaggccagttcgttaaccgcgcgccacgcctgatcgatcgccgagttggcgtacgggctccagtcggcatcggagttggcgatagcgatcttgccgatcggctgccgcgccgtttcgatgattttcttggcttcgtcttcgtcgtcaaacagcccgttgaggaagtaggagtaaccgtgcgaccagcggttgacggtgatcgcctgaatgtcgcgctgatgatcgaaaccggcctcgcccagcatgccctgcagctgttcgcggatcatctgttcgtgcacttcgaacggcgtgcccagcagcagcgcgcgccctttacgcgactgttcgcgcgtgctgaggccgctgcccggcagcgtcggcacatacaccatatgcaggccgatcggccgatccggatcgcgcgggtgctgatagccgcccatgctcaccggatagtccagcttcacgcggctgtacggcgcggccggcgaataaacctcgtgcacgcccagcttgatgaacggctgccagttgcggatcaccaccttgctgtacaccagcggcgccttgacgttctgcttcagcgcctcctgctgctcgtgcgccatctccggcaccagatacgggatcatcatgttgtagccggccatcaccacctgcccggcgcgcactttggtcatcttctcgccggtcatgtaggtgacttccaccttgtcgccgacgttggccgcgtgcagcccggtgctgttcaaacgcagcttcaccggcgactccggccgatcgagctggctgtagtcgaatttagccagcaccacatcgttcatgtccttgccggccggcgccaccgccgggatcagctggcgcaccatcaggcgcgccagcgtggcgttgccgtccgggaagtggaacacgtaaggatcgtcgagatccgcctgcgactcttcgtccagcggcggcagattcatgccgtcaaggcccggcagatcgcagatgcgcgcatcactgcacgaggtgccgtcgatgcccaccgcctggaagtcgttggtggtctgctggaaatagcggatcgccagttcgctcaggcccaccttctcgcgcaggaactgggtatagctgtgggtatcgagccattcgaccttctgctccagcgtcatctccggcagataatccttctccaccgtgtgcagcgcgatcagcgcctggcgatcgctttccggcagcgggaaatcgccgatgaacgcttcataagagcggccgttgaggcgatcgcgcggaatgtcgtccgccaccgtgcgccccggatcgccgctcaccaccttgtcgacgccgaagtttttgcgatcgaagtaaacgccgcggctcaaattcaaatccgggtagaaggtggtgtcgaaagcctgttccagttggtcgatatcgacgccgagcttgcgcagcagccccatcgccaccgggctgaagttggaacgcggcgactgcaacgattcgctgccgccgtagccgagcagcatgccgtcgtcgctgttgaactcgttgcgcttggcatggccgccgaagtcgtcgtggttgtcgatcaaaagaatgcgctgctgctcgcccttcagctgctgccagaaacaggcggccgccagcccgctgatgccggcgcccaccaccaccagatcgaactcttcaacggcgggcacgctgccgaaatcaaaggttttgccgtcgcgccccagctggtgcgcatgctcgaacgagcccggatggttaccccgcagcccggtcagcgccggcgggtagtacagggtttgattggcggtttgcggcgacgcgcgcaagatttgcagcggcgtcaacccggcggcgatggtgatcgccaccccgttgagaaaatcgcgtctggtgatacccatataggcttcctttcaatttttattatcatcggccggccggggccggcccaaaggccgcgctattgtgcggataattattgtaaaatcaatgtttgaacatcacatgacgaatggccgtgtaatcctccagcccgtacatcgacatatccttgccgtagccggacagtttctggccgccgtgcggcatctcgctcaccagcatgaagtgggtgttcacccaggtacagccgtattgcaggcgggcgcttaagcgatgtgcgcggcccacgtcgcgggtccatacggacgacgccagcccgtagttggattcgttcgcccaggccagcacctgctcttcgtcgtcgaacggcgtcaccgtcaccaccgggccgaacacttcgcgctgcacgatctcgtcttcctggcgcgcgccggccagcagcgtcggctggaaatagtagcccggccccttcaccttctcgccgccggtgaccacctgcacatgcggcaacgctttggctcgctcgacaaaaccggccacccgctccagatgctgggcggtaatcaacggccccagctcggtgctctcgtcgtccggcgcgccgatcttcaggctggccaccgcctcgcccagccgcttcaccagctcgggataaatgcttttctgcgcgtagatgcggcaggcggctgtgcaatcctggccggcgttgtagaacccaaaaccgcgaatgccgtccaccacctgctgcagatcggcgtcgtcgaacaccagcaccggcgccttgccgcccagctccatatgggtgcgtttaatgccggcggcggtgtgggcgatgatgtgctcgccggtggcgatcgacccggtcagcgacaccatgcgcaccttatcatgcccggtcagccgatcgccgacgctggcgccgcgcccgaacagcacgttgagcacgcccggcgggaacagcccggcggccagttcggccagtttgaaggtggtcagcggcgtctgctccgaaggcttgatcaccacgcagttgcccgccgccagcgccggcgccagtttccaggccgccatcatcagcgggtagttccacggcgcgatcgaggccaccacgccgagcggatcgcggcggatcatcgaggtgtgcccggccagatactcaccggccgccatgccggtcaggcagcggctggcgccggcgaagaagcgaaacacgtcggccaccgccggcagctcgtcgttcagcacgcagtgataaggcttgccgcagttgagcgactccagcctggcgaaggtctcggcatgctcgtcgatcagatccgccagcttgagcagatgctcggcgcgctccttcggcgtggtttgcccccaggcggcgaacgcggcgtccgccgccagcaccgcgcgatcgacctgctccgggctggcctccgccacctgcgcgatcacttcgccggtcgccgggttatacaccggctgggtcgcgccctggccattcaccagttggccgtcaatcaacagttggctttgcatagggttatccttttgtcagaggtcgggtaaggaaattattttccgctgccggcgacgctttccccacctttggtcaggtagtaagcgccgaggatcggcagcatggtcaacagcatcaccgacagcgccaccacgttggtgatcggcacgtcgcgcgggcgaccgagctggttcagcagccacagcggcagcgtgcgctcgtggccggcggtaaaggtggtcacgatgatttcatcaaacgacagcgcaaacgccagcatgccgccggccagcagcgccgagccgaggttcggcaagatcacgtaacggaaggtttgccagccgtcggcgccaagatccatcgacgcttcgatcaggctgtacgaggtgcggcggaatcgggcgatgacgttgttgaacacgatcaccacgcagaacgtcgcatggccgacgacgatggtcaggatgcccggctcgatgttcagcgccttgaacgccgccagcagcgccaggccggtgacgatccccggcagcgcgatcggcagcagcagcaacagcgaaatgctgtctttgccgaagaaatcgcgccgatacagcgccgccgccgccagggtgccgagcaccagcgcgatggcggtcgccaggcaggcgatctgcgccgacagcagcaccgcatcgaggatgtcctgccgcccggcggcaacgttgaaccagtgcagcgtaaagcccttcggcgggaagctgaaggccgcgtcctcggtgttgaaggcatagatggcgatgatcgccaacgggaaatgcaggaagacaagtccgccccaggcggccagcttcagccctaagggcgcgcgttcagagtgcatcgaaagcccccagacgtttgacgatggaaaggtagatggcgatcaggacgatcggcaccagcgtaaaggccgcggccatcggcatattgccgatcgcgccctgctgggcgtagaccatgctgccgatgaaatagcccggcggccccaccagctgcggcacgataaagtcgcccagcgtcagcgaaaaggtgaagatcgatccggcggcgatgcccggcaccgccagcggcaaaatgacgtggcggaaggtctgcgccggccgggcgcccagatccgccgaagcgtgcagcagcgagggcggcaggcgctccagcgccgcctggatcggcaggatcatgaacggcagccagatataaacgaacaccagaaaacgccccagccccgaggtcgacagcgtgttgccgccgatgccgggcaccgtcagcagcgaagccaacagcggctccagccccaggtgctgcagaaaccactgcgccacgccgtctttcgccagcagcagggtccaggcataggctttgacgatatagctggcccacatcggcatcatcaccgcgatgtaaaagaacgccttgacgcggccgctggtataacgcgccatgtaataggcgatcgggaacgccagtaccgcgctggccagcgacaccagcaccgccatggtcaacgtgcgcaggatgatgtcgtagttggccgggttgaacagcgccgccaggttggcgaaggtcagatccggcgtcaccgccatggtgaaatcgtcgaaggtgtagaacccctgccacagcagcgtcagcagcgagccgaggtacaccgcgccgaaccacagcagcggcggcaccagcagtaacagcagatacagcgtcggccggcgatagagccaggtcgacagcgcgcgcacgctaccgccgcgcgccgggggggaatcgatgctcatgtccatctcacctctcctccagcagcggcaccatcgccgcgcgcggccagcaggcgacgatcggctggccgatctgacgctgttgcccttcggcgatccactgtggattggcctggctgaccagcagcttttcgccgccgttcagcgcgatctcatagcgcgtggccgcgccctggtagtggatttcctgcagcgtgccctgcacctggatttcgtcctgcgccgcgccgccttgctccagcaggcgaatatgctccggccggatcgagaaggttcggctttcgccgagcagacgctgcgccagctcgctgcgcaccacgttggaggtgccgacaaactcggcgacgaacggcgtcttcggccgcatgtaaagctcgcgcggcgtatccacctgctcgatgcggccgttattgaataccgccacccgatcggacatcgacagcgcttcgctttgatcgtgggtgacgaagataaaggtgatgcccagctggcgctgcagcttcttcagttcgccctgcatctgctcgcgcagcttgagatccagcgcgccgagcggttcgtccagcagcagcacccgtggccggttgaccagcgcgcgcgccagcgccacgcgctgccgctggccgcccgacaggtgcgccggcttgcgttcggcgacgaaaccgagcgccacgctctccagcgcctcttgcgcccgcgccagccgctcgcgtttggcgacgcccttcaccatcaggccgtaggcgacgttttccagcaccgacatgtgcggaaacagcgcgtaatcctgaaacacggtattcacgtcgcgctgatacggcggcaggttggcggcttcctggccgtgaatgcgaatcgagccggaagtgagctgttcaaagccggcgatcaggcgcaggcaggtggttttgcccgagccggacggcccgagcatggagaagaattccccgtcctgaatgtcgatggatacccgatccacggcgcgaacatcgccgaaagtccgcgaaacatcgatgaattgcacggcaatggtcattttctgtgctccattctgatgtgattcgggcgcagcgggctgcgccccgcggcttagcggccgcccatgatggcgatgtaatcctgggtccagcggctgtacggcacgaacttgccgccctgcgcctgcggcgttttccagaaggcgattttgtcgaactggttgaaaccgttggtttcgcaacccttctcacccagcagcgcgctggccttgcagcccgccggcgaagccggcaccgacccgaaccaggccgccacgtcgccctgcaccttcggctccagcgaccagttcatccactggtaggcgcagctcgggtgtttggcatcggcatgcagcatggtggtgtccgcccagccggtcacgccctctttcgggaacacggtggcgatcggctgtccttcgcccttcagggcgttggcctgatacggccaggcgctggaggccaccacgccttcgtttttaaagtcgctcatctgcaccgaggtatcgtgccagtagcggtggatcagcgcgtgctggctgcgcagcagcttcagcgccgcctgatactgctcttcgttgagctggtaaggatcgctgatgccgagctgcggctgggtggccttcaggaacagcgccgcgtcggcgatgtagatcgggccgtcgtaagcctgcacccgcccctggttgctcttaccgtccggcaggttctgctgctggaagatcaccgcccagctgtccggcggcgtcgggaaggttttggtgttgtacatcagcaggttcggtccccactggtacggcgtgccgtaagttttgccgtccacggtataccaggcgccgttcagcaggcgcggatcgatgttcttccagttcgggatcagcgcggtgttgatcggctgcacccgcttgccgaagatcaggcgtagcgaggcgtcgccggaggcggtcaccagatcgtagccgcccttggccatcaggctgaccatttcatcggaggtggcggcggtcttcacgttcaccgcacagccggtttgcttttcaaactgggtgacccagtcgtagtttttgtcggactggccgcgttcgatgtagccgggccaggcgatgatgtccagccggccttcgcctttgcccagcgcctgcggcagatcggccgcctgggccaggccgcacagcacggtgagacagagcgcggagacggtggtggtgactgcggtagtttttcccatcgtaattacccctgtgttgcttatcggtatgcggcagggaacggctgccgcctgatttttcttgatataaccgttagaagctggctttgaacttcgccattacgtgcctgacaacgctgtaatcctgcagcgaatcgctggacagatccttgccgtagccggagcgtttcaggccgccgtgcggcatttcgctcgccaaggtgaaatgagtgttgatccaggtgctgccgtactgcagatgggcggcaatgtgcagcgcccgatcgatattttgcgtccacaccgacgaggccagcccgtattccgagtcgttggcccaggcgaccgcctgctccaggtgttcgaagcgcgtgacgctgaccaccgggccaaacacctcacgctgcacgatctcgtcgctttgcaggcaacccgccagcaaggtcggctggtagtagaaccccggcccggagtgcgccgcggcaccggtgatcaattcgatatgcggttggctgagcgcccgctcgacaaaactggcgacgcgatcgcgctggcgggcacttatcaacgggccgatctcgttgtcctgatcgcgcttgcgggcgaagcgcaggctggcgaccgcttcgcccagcgcgtccaccagtttgggatagatgccggcctgcgcgtagatgcggcaggcggcggtgcagtcctggccggcgttgtaatagccataggtgcgaatgccgttgaccacctcgtcgagatcggcgtcgtcgcaaacgatcaccggcgccttgccccccagctccagatgggtgcgcttgacgcttttggccgccgcctggaggattttttgcccggtgacgatatcgccggtgaccgacaccagccgcacctgcgggtgccccaccagctggctgccgaccccttcaccgccgccgtagacgatgttcagcacgcccggcggcaggatctcctgcagcgccggcaccaacgccagaatggtcagcggcgtatgttcggagggtttaaacaccacggtattgcccgccgccaacgccggcgcgatcttccacgccgccatcatcagcggatagttccagggggcgatcgaggccaccacgccaatgggatcgcggcggatcatcgaggtgtggcccggcacatactcaccggccagttgcccttgctgcgtgcgcaccgcgccggcaaagaagcggaacacgtcgaccgccgccggcagatcgtcattgagcgcctgatgcaacggtttgccgcagttgagggcctccagctgcgccagctgcggcgcctgccgctcaatggcgtcggcgatacgcagcaataaggcggcgcgctggcctggcgtggtacgcgaccagtggccaaacgcctgctgcgcggctttcaccgcgctgccgacctgcgccgaagaggcttcggtaagggcgatcagcgtctcgccgttagccggattgacgatgcactcctgctggccttcgccgtcgataagctgaccgttaatgaactgctgacaggacaaacctgagagaacctgcacatccgccatcgcctgacgcccctaagtgacaaaaacgttaaccaaatgtgaataagttagttttaatcagcctaagcgagcctctggcgggcaacaaattctaaatactgaacgacgcgttcgattaaatcgaatgcttaagcccggcggcatgtttgctgccgttctcgcgcgcgatggtgaggaacggcgtcaccagctccggccgcgcgctgccgcgccgccatgccaacccgatatccagcggctccagcagatcgtccagcttgcgcgcctcgatcatgttgccctccagcgaccaggcgcggtacgccatatccggctggatggagactcccatccccgccgccaccaggctgcgcaccgcctcggtcgaggcggtcttcatggcgatctccggcttcagcccggcgcgcgcccagatgcgccgcgcgtgcacgtccatttcatcggcgttgagctggatcagcggctgtttggccacgtccgccaggctgatgctctcgtgctccagcagcgggtgcagcggcggcagccacaggcgatacggcgagtgcatcagcacctcggtctgcagcgcgtcgcggtcctcgatgttcgacaagatcagcacgccgatgtcgatctcgccgctgaccagcagatgctcgatgtacgggcgttcgtcttcaaccacctgcacggtgacattgggataagccgatttaaagcgcgtgagcagttccaccaggaagtaaccggccaccaggctggtgacgccgatagtcagcttgccggtcaggctttcggtgccgatctgcaggctgcgcttggcgttgtccaccgtcgccaggatcagatacgactggcgcaagaattggtgcccctgatgggtcagcgtcatgcccttggcgtggcgatcgaacagccgcacgccgatctcggtttccagctgctggatcgccagcgtcagcgaagactgggagacaaacaccgcctgggcgccggcggagatcgacccggtttccgccacggcgatgaagtggcggatttggcgtaacgtcatcatgggggtgattcctcaagcaaaaacattgcgttgagtgtagacgccggccgtgaagcgatcgggaaaagtgtcaaaaacgcgatagcgttcgcttttttagaatgcccgcaggcaaaaatgggggaaacggcgaggcgaagaagtgtgatgtacggggagcagaaatgacaagggcgcagcatgctgcgccctcctgatggccgatgaacctgcggaggatcagatcgcttcttcgtcctgctcgccggtacggatacgcaccacacgcgccacgtcgaagacgaagattttgccgtcgccgatcttgccggtctgcgcggtttgcataatggtttccacgcaggtgtcgacgatgtcgtcggcaaccacgatctcgatcttcaccttaggcagaaaatcgaccatgtattcggcgccgcggtacagctcggtgtggcccttctggcggccgaagcctttgacttcggtgaccgtcatgccggtgatgcccacttcggccagcgcttcgcggacgtcatccagtttgaacggcttgataatcgcgtcgatctttttcatcttctttccttttaccaatttttgcggccaaaaccggatgtgatggggtagcggcggtctttgccgaagttacgggcggtgatacgcggcccgacggcggcctgacgccgcttgtattcgttgatgtccaccaggcggatcaccttgcgcacgatcgcttcgtcgaacccttcggccaccagatcggcgaccgacttgtcgcgctcgacgtagccttccaggatcgcatccaggatatcgtacggcggcaggctgtcctgatcgacctgatccggcgccagctcggcggacggcggacgatcgatcacccgctgcgggatcacgtaggagacggtgttacggtattcagacaacttgaacaccagcgttttcggcacgtccttcagcacgtcgaaaccgccggccatatcgccgtacagcgtggcgtaaccgaccgccatttcgctcttgttgccggtggtcagcacgatgctgcggcgcttgttggacagcgccatcagcaccaccccgcggcaacgcgcctgcaggttctcttcggtggtgtcgcgctcggtgccggcgaacatcggcgacagctggcccataaaggcgtcgaacatcggttcgatggagacgatatcgaactccacgccgaggatttccgcctcttccttggcgtcggcgatgctgatatccgcggtgtagcggaatggcatcatcagcgcctgcaccttgtctttgcccaacgcatccacggcgatcgccagcgtcagcgccgagtcgatgccgccggacagccccagcaccgcgcctttaaagccgtttttggtcacgtagtcgcgcaccgccagcaccagcgcctgatacacctgcgccagctgcggcagctcagcggccggatcggccatcggcaccacatccagctcgttgaattccaggcgggtcacctgctcgtcgaaggccgccagacggtgggtcatggtgccggcggcgtcgaagaccttggagcagccgtcgaagatcagctcatcctggccgccgacctggttgaggtacaccagcggcagctgggtgcgctggcagtggccggccatcagcgttttgcggatatacggtttttcgcgattatacggcgaggcgttgatcgacaggataatctccgcgccggccgccttggcggcgtcgatcggctcagggaaccacagatcttcgcagatcagcagccccagacggtagcctttcagctccaccacgcaggtgtcgttgccggcgtggaaatagcgcttctcatcgaacacgccgtagttcggcagctgctgcttgaagtagcgggtcagcaggcggccttcggcgaacagcgacagcgcgttgtacagcttgtcgccttcgcgccacgggtggccgaccaggatcgccgtctcggcggaggcctgctgcaggcgcagcagctgcgcatcgcagcgctcatagaaatcattgcgatacagcagatcttccggcgggtagccggacagcgccagttcgctgaacatgaccagatcggctcccgccttctgctgctcctgcacgatttgcaacatgcgttcggtgttgccttcaatgtcgccgaccagcaggttcaactgggccagggcgatggaaagtgatctgctcatttgtgtacgatcccgcttaatacgttccatggtgctctacgccggggcacgccgcggcaaagagaacggagtgtaaatcattccgccggatttgttgagaacctgcgtggcaggcgccggcgggaaactgtcattctttaaaatcgttggcgtccagctcgtggcgcgacagcaatttgtaaaactcggtgcggttgcggcccgccatgcgcgcggcctgggtcacgttgcccttggtgatctgcagcagcttgcgcaggtaatgcaactcgaactggttacgcgcttcggcaaaggtcggcagcgcggtattttccccttccagcgcctgctccaccaacgcttcgctgatcaccggcgccgaggtcagcgccacgcactgctcgatgacgttgaccagctgacgcacgttgcccggccagctggcggtcatcagccgcttcatggcgtcggtcgagaagctgcgcacgaacggcttgtgccgctgagccgcttcgcgcaacaggtgattggccagcagcgggatatcttcggcgcgctcgttgagcgccgggatcttgaggttcaccacgttgaggcggtagtagagatcctcgcggaactcgttcttcgccatcgccttttgcagatcgcggtgggtggcggagatgatgcgtacgtcaatgtccagatcgcgattgctgccgagcggccgcaccttgcgttcctgcagcacgcgcagcagcttcacctgcagcgacagcggcatatcgccgatctcgtcgaggaacagcgtgccgcccgccgccgcctggaacagcccttcgcggctgctgaccgcgccggtaaaggcgcccttggcgtggccgaacagttcggactccagcagctgctccggcagcgcgccgcagttgatggcgatgaacgccttgctggcgcgcgggctggccgcgtggatcgcctgcgccaccacctctttaccggtgccgctctggccgttgatcaatacgctgacgtcggactgcgccaccattttcacctgctccagcaggcgcagcatcaacgggctgcgggtgacgatgtcttcccgccaggcatcgtcgccggccgggctggccgacagcgcgagcgcctcgtcgatggccttgtacagcgcatcgcgatccaccggcttggtgagaaagctgaacaccccctgctgggtagcggccaccgcatcgggaatcgaaccgtgcgcggtgagaatgatcaccggcatgcccggctgatgtttttggatctcggcgaacagcgccatgccgtccatctcatccatgcgcagatcgctgatcaccagatcgatctgttcgcgcgccagcaggcgcagcgcttcctggccgctttcggcggtggtgacgtgaaaaccttcgctggtcaggcgcatgcccagcagcttcagcaggctgggatcgtcgtcaaccaataacaggttggccggtttgcgtgcggtcattgcgcgtgggactccttattggcagggtgcggcgtataggtgtcttccggttcaaccggcagcgcagtgcccttttccggctcgtcctgcggctcagcccctttcgcggccgcgccgtttttaccggcggcttcgcccttttgcgagcctgtgccgttgtccggtatttccccttgcagctgcttgcgcgatgagagctggcgctcgatgtcggtcaggttttccagcttgcgcgaggtgtcctgcagctgcgattgcaagcgcgcctggctctggcgcagcgaatcgatctggctgtcgctgctttcctgcagatgctgataacgcgctttctcatcgaacagcgtgatctgcagcatctgctgctggcgccacagctgcgtcagtggacgcagcgaaccgggaaactccatccggtagctgttgatcctgtcgatcatctggcggcgttcgccggaggtcggctgtgcgctccccagcaggatgctctgtttgaaaacgccggaccagctgtcgccaggcaccgttttcgccagcgcgcgcgcctgggttgagccgatgcgatcggcgcagtccatcgcacgcagccagtagagcgcgttatccagcgcgtccttgtcgtccaactgccacagggtatcgcaggccgcggtgcggtaatcgatcaccttggtatccgggatcgcttcttgctgctgagcgctcaggccgccgctgaccgcgcgatcgacgcagcccgccagcaacagcggcataaagaaaacggcgcccaaccagctgatcgggcgtttgccgagcggcgctctgtgcgtggcacgcggtgaacgttcggtctgcgaaagacgaaggcgtttagaccatgtgtacattatttattcattctcggcggttaacggcagttcaatgcggaagcagacgtctgcaccggcgaccgtcgccagttgcagctcaccgcgcatgcgacggatacagtcctgagcgatgctcaaccccagtccgcttccttttaccgccccttttcgctggtgactaccctggaaaaaaggctcgaaaatcatggctctttcagcctcggggatcggcgtgccggtattggcgacgtcgatttgcacccgttgtccaacctgacggctgcggatccaaatgttaccggattccttgccgtagtgcaccgcattggagtagagattatccagcacgcgcattaatagcgtaggctctgcccagcagatttccgcctccagcgcgatttcggtggaaatcatcttcgcccgcgccggcaaactgtgcgcggcgaccaccaaatcgaccatctcgcgcagctcgacgttctcgtgttccgccgggccgtcggccagtttgcggttgtaatccagcagttgttcaatcagctgctgcaggtggcgactgctgttgtcgaggatcgccaccacctctttttgatcggaggtcagcggccccgccacttcgtcggccagcagttcggtgccttcacgcatgctggccagcggcgttttcaactcgtgcgagatatggcgcaagaactcgtggcgctgcgattccagccacgccagccgctcgctcagccaaatgatgcgctgcgccagcgaacgcagctcgcgcggccctttgaacgacgcggtgctgcccagcgcgcgcccttcccccaggcgattgatcatccgttccacggccttgaccggcccgatgatcatgcgggtgaacagcaccaccagcagcacgctgaccaggaacaacagcagcgcctgccagccgaagaactggccgcgctcggcgatggcttgctgcagctgctggccgcgcgagaacaccaccgcgcgcgtggcctgcaccatttcggcgttggaacgggagaacgattcgagcagggccgaagcctcttggtccggcccgctgttatggcatttgatcgccgccagctgggtcagcaactgacgcagcgtttggtagtagcgctcgtccggcaggatcggcgcgtgggcgtccagcatctgcgaatactgtttgcgctggttctggtacagcttctgcagcgtaggatcgaccagcacgcagtactgacgatagctgcgctccatctccagcgccacgctggtcatcgcctcgctgcgccgcgcgtccaccagcgtggtgcggttgatgtccgccgcctgcgcgctgaggtgatccaggctctggtaggcttgataggccagcaccaacagcggcaacagcaccaacaggaaggccagcagcaccaattgccgcagcgaacgggggaataaacgccattttttcaacgaaatcatctcattctctcagctctgtcacgatgctaactgactcgccggaaagagaaaagcccggcaggggagaatcctgaacgcgcaaggaaaaagccgcgggatcggcgaagcgcgcccatgggcctggcctgccgacggcatgcggccccggtaacatcaaccggcgcgaaaacgagagtgtggggatagcgtctgcgttcgagggcataggcaacgaaacgggcatagcgcagcgttgagaattgacatcggggcaagaaacttgccccaacgcaaggaaagtgtggatgcccttaaacctcgtccccagggtgatgtagcgcagcggctggcatcgaacaggacgaatagcatccgtaagtatccaggattgatgaacccttcatcacagttggatacaggcggtgcctcactccacgtgtcgcccgatgcttgataaagccgcttgcgcggtctgttatcggtttggttggacgataggcaccatttctttggcatcattcggaggcttatgaggcgatttgccgtctaattacggcgccgtcataaaaaggtgaatgagcagccgccaagaataatgcacgtagcgtgccaactttgcaataaaaataataacacaatgattttatttaaaaataaaattacatcagcaaattcccccacccattacgcactgatgagcgatgaaaaaaacgccgtgctgtcgccaaatgcagacaactaaagtcaaacctgcttacctacaataaaatcaattagttaaacgtctccatttggcgacaggggaaatagcgcttgtcgcaaaatgcagacactgccgccagacggcgaacgccggccataaaaaagggcgcaattgcttgcgccctctgtacggtggtgatcgtttttagcccagctgcttacgggcgttgcggaacatacgcatccacgggctgtcctcgccccactcttccgggtgccaggagttgctgacggtgcggaacacgcgctccgggtgcggcatcatcaccgtggcgcgcccgctggcgctggtcactgcggtaatgccgttcggcgagccgttcgggttggccgggtaagcttccgtcacctgaccggcgttgttgacgaaacgcagcgccaccaggccgtggctttccaacgccgccagatgcgccgcatcgcgcacttcgacgtgcccttcaccgtgggaaacggcgatcggcatgcgcgagccggtcatgccctgcatgaacagcgacgggctggccgccacttccaccaggctgaagcgcgcctcgaagcgatccgacaggttgcgcacgaagcgcggccagtgttcggcgcccgggatcagctcacgcaggttggacatcatctggcagccgttgcatacgcccagcgccagcgtctgcggacggtggaagaacgcttcaaactcgtcgcgcacccgctcgttgaacaggatagacttcgcccagccttcgccggcgcccaggacgtcgccgtaagagaagccgccgcaggccaccagcgtgtggaagtcctgcagatcgcggcgcccggccagcagatcgctcatgtgcacgtccacggcgtcaaagccggcgcggtggaacgccgccgccatttcaacgtgggagttcaccccctgctcgcgcagcaccgccactttcgggcgagcgcccttggcgatgtacggcgcagcgatgtcttcctcaggtgcgaaggtcagcttcacgttcaggccgggatcttgttcatcctgcttggcctgatgttcctgatcggcgcacgccgggttgtcgcgcaggcgctgcatctgccaggtggtttccgcccaccaggtgcgcagcgtattgcggctttcgctgtacaacgccttgccatgttggttgatgacgaaacgatcgccggcctgcgcgctgccgatctgatgcacgttgtcagtcagcccatgctgagcgaacgcctgcttcacctcgtcgagacgttcggcgctcacctggatcaccgcgcccagctcttcgttgaacagcaccgccagcgcatcgtcgccgaggccatcgaggttaacctctacgccgcagtgaccggcaaaggccatctccgccagcgtcaccagcaggccgccgtcggcgcggtcgtgataagccagcagcgcgcgatcggccaccagctgctgcatggcgttgaagaagcccgccagctgcgcgacatcgcgcacatcggccggtttgtcgcccagttggcgataaacctgcgccagcgcggtagcgcccagcgcgttatggccgttgcccagatcgatcaacagcagcgcgctgtcgcccttatcggtgcgcaattgcggcgtcacggtgtggcgcacgtcttccacgcgggcaaaggcggtgatgaccagcgacagcggcgaggtcatttcgcgctgttcgtcgccttcctgccagcgggttttcatcgacatggagtctttgcccaccggaatggtgatgcccagcgccgggcacagctcttcgcccaccgctttcaccgcttcgtacaggccggcgtcttcgcccgggtggccggcggcggccatccagttggcggacagcttcacgcgcttcaggctgccgatttccgtggcagccaggttggtcagcgcttccccgaccgccaggcggccggaagcggcgaagtccagcagcgccaccggcgcgcgttcgccgatcgacatcgcctcgccgtaatagctgtccaggctggcggtggtgaccgcgcagtcggccaccgggatctgccacgggccgaccatttggtcacgcgccaccatgccggtgacggtgcggtcgccgatggtgatcaggaaggttttctccgcgacggccggcagatgcagcacgcgcttcaccgcgtcggccagcgtgatgtccccacgctgcaccgcctggccctgcgcctgcagacgggtgacatcgcgggtcatcttcggcgttttgccgagcagcacgtccagcggcatgtcgatcggttggttgtcgaagtggcggtcgttcagcgtcaggtgctgttcttcggtcgcttcaccgatcaccgcataaggcgcgcgctcgcggcggcagatctcgtcgaactgcgccatctgcgccggggcgatcgccatcacgtaacgttcctgcgattcgttgcaccacacttccagcgggctcatgcccggctcgtcgttgaggatatcgcgcagctcgaagcgcccaccgcggccgccgtcgctcaccagctccggcatggcgttggacaggccgccggcgccgacgtcatggataaacaggatcgggttctggtcgcccagctgccagcagcggtcgatcacttcctgacagcggcgttccatttccgggttgtcgcgctgcaccgaagcgaagtccagatcggcatcggactggccggacgccatcgaggacgccgcgccgccgcccaggccgatattcatcgccgggccgcccagcaccaccagcttggcgccgacggtgatttcccctttctgcacgtgatcggcgcggatgttgccgatgccgcccgccagcatgatcggtttgtggtagccgcgcagctcgacgccgttatggctgttgacgcgctcttcataggtgcggaagtagcccagcagcgccgggcgaccgaattcgttgttgaacgccgcgccgcccagcgggccttcggtcatgatgtccagtgcggtgacgatgcgttccggcttgccgaagtcctgctcccacggctgttcaaagccgggaatgcgcaggttggacaccgagaagcccaccaggccggccttcggcttggcgccgcggccgggggcgccctcgtcgcggatctcgccgccggagccggtcgcggcgcccggccacggcgaaatcgccgtcgggtggttgtgagtttccaccttcatcaggatgtgcgcgtcttcctgatggtaatcgtacgtgccgttctccggcgcggcgaagaagcggccgacctgcgaaccttccatcacggcggcgttgtctttatacgccgacagcacgtagtccggcgtctgctcgtaggtattcttgatcattttgaacagcgacttgggctgctgctcgccgtcgatgatccagtcggcgttgaaaatcttgtggcggcagtgctcagagttggcctgcgcgaacatatagagttcgatatccgtcgggttgcgccccaaaccggtaaaggcattcagcaggtagtcgatctcgtcctgcgccagcgccaggccgagccggacgttggcttgctccagcgcagcgcgccctgcgcccagcacgtcgaccgactgatacggcgccggctgatggtgcgcgaacagctgttcagcctgttgcagctcgctgaagacggtttccatcatgcgatcgtgcaacagtgcggcgagctggcgccactgggtttccgtcagctcgggcgccttgacgtagaacgccaggccgcgctccaggcgcagcacctgttgcaagccgcagttgtgggcgatgtcggtggctttggaagaccagggagaaatggtgcccggacgcggcgtaaccagcagcagccggccttcaggggcgtgttcggcgagagaaggaccgtacttgagcagacgctgaagcttggcgtgttcttcggcacttagcggtgcgctgacatcggcaaagtggacgtactcggcgtagatatcactgacgggcaggtgagcgtcctggcagcgggacagcagtttggtaatgcgaaaagccgataaagcgggcgaaccacgcagaatttccataatcaaagttctctcgtcttcgaagcgaaggataagacgcttcattgggcgcaacaggggaaaacgcgcgtcattatagagaatcctcggcgccgacgaaaccgtttgcgtagggattattgataaaagcgtgccgcaccgtcgaattgtcataacgtgtcaataaagttgcacactggcgttttgttgcgcaaaatgccccccgcactggtgatttaaccatgagaaaagtcgcggttgtcgtcgccggcgtacctgtgccaccactggataactatttgaaacgtcttaaaataaactacatcctcatcggcgttgtcactctgcttctggctctcgcgctgtggcccaacatcacctggcgcagcggccagggcgggcaactccaggagatcatttcccgcggcgagttgcgtatcagcacgctgaattcaccgctgacctatttcaacaccaagcaagggccgggtgggctcgactacgaactggccaagcgcttcgccaactacctcggggtgaagctggtggtgatcccccatcagaacatcaatgacctgttcgacgatctggacgacgacgacgccgacctgctggcggcgggcctgatctacaaccaggagcgcctcagccgcgcgcgcaccggcccggcctactactccgtttcccaacagctggtgtaccggctgggcaccccgcggccgaaaagcttcgccgacatcaaaggcaagctggcggtcgcctccggttccgcgcacgtcagcacgctaaaacagctcaagcaggataaatacccggatctcgcctgggagtcctccagcgatctcacctccaaagaactgctggagcgggtggccgacggcaagctggactataccctcggcgattcggtgaccatcgcgctgctgcagcgcatccatccgcagctggcggtggcgttcgacgtcaccgacgaagagccggtcacctggtacctcaaacgcgacggcgacgacagcctgtacgcggcgatgctggatttctacagtcagatggtggacgacggcaccctggcgcggctggaagagaaatacctcggccacgtcggcagcttcgactatgtggacaccaaaaccttcctgtcggccatcgattcggtgctgcccaacttccgcccgctgttcgagaagcacgccaacgagatcgactggaagctgctggcggccatcgcctatcaggaatcgcactggaatccgcaggccacttcccccaccggcgtgcgcggcctgatgatgctgacccgcgccaccgccgacggcctgggggtcaacgatcgcctcgatccggaagagagcattcagggcggcgccctttacctgcagcggctgatggccaaggtgccggacagcgtgccggaagacgagcgcatctggttctcgctggcggcctacaacatgggttggggccatatgctggacgcgcgcaagctgaccaaaacgcaaaaaggcaacccggacagctgggtcgacgtcaaacagcgcctgccgatgctcagccaaaagcgctactacccgcagctgacctacggctatgcgcgcgggcgtgaagcctacaactatgtagaaaacatccgccgctatcaggtcagcctggtgggctatctgcaggaaaaagagagaaaggcggcgcaagcggccgccgagcaggaagcgttggggaaaggctacccgacggtgatgccggaactggcgctcaactactgattattccggcttatccgccgcccgctgcgccagcctgagcgcttttttctgttcgcggcgcaggcggaagaaattgctcagggtggcggcgcattcgtccgccagcacgcccgagacgatctccacctgatggttcatgcccggatggcgcaaaatgtccaccagcgagccggccgcgccggttttctcgtcggcggcgccgtacaccaaccggcggatgcggctgtgcaccatcgcgccggcgcacatcacgcagggctccagcgtgacgtacagcgtggcgttcagcaggcgatagttttgcagcaccgcgccgccctggcgcagcgccatgatctcggcgtgtgcggtaggatcgtggcggccgatcggccggttccagccctcgccgatgacctgattgtccagcaccagcagcgcacccaccggcacctcgccctcttcctgcgcgcgcagggccagctgcaatgcctgacgcatccagtactcatcgttatattcagtcatcgcataattcctcgtgcgcttttgcggcgggcattatacacactagcctccctttgtcgtagccgcccgccaatggctatactggccgaatcggccgatgattcagggacaagaagcatgaaactcagtaaaaagaacgccgtcgtggtgcgcaaggcgctggacggttgggttggggaaggcgccatgacgcccgaacaacggcagcaactgctgcagcatgtggacgtgcaacctttcgactggcggcgactggcgcgctatgcgtttctcgccgcgctggcctcgctgctgatcgccgtcaccagcctgttcgccgacagcgaactgcttgcatggctgagcgaactgttccgcttcgacgcgccggtgcgcatggcgatcgccggcgtactggcggcgctggcctacgtttgggcgctgcgtcgtcgtcaacgccatccggaaaaacgctacggcaatgaggcggcgctgtttgtcgccgtgttgctcaccgcctgcgccttatggcaactgggcgtctggctggataacggcagcgggcgggtttccgtgctgctgctggtcgccgcgctgctgtacggcgcgatcggctggttcagccgctccgggctggtatggtggttcgccctgctgtcgctcggcaatgccttcggcgccgagaccggctacctgtccggctggggcgcctactggctcggcatgagctacccgattcgctttatcgccttcggcggggtgctgatcgccgccgcattgctgctgcggccgctcttggcgcagcgcggcctgcagcgggtgtcgctggcgatgggcctgctgtacctgttcatcgcgctgtggctgctgtccatcttcggcaactacggcgatctcgacagctggtaccgcgcgcgccagattgagctgttccactggagcctgctgttcgggctggccgccctcgtcgccatctggctggggttgaagcatgacgacgccatgctgcgcggtttcgggctgaccttcctcggcatcaacctctatacccgcctgttcgagtttttctgggacagcatgccgaaaacgattttcttcgcgctgctcggcctgagcctgtgggcgttggggcattatgcggaaaagatttggcagctcgggcgcaaaccacacgacgtaaccgacgactgatcgcggcagcgacaacagcaaagggcggaattctccgccctttgtttattccagctgctgcagctcgccctgcttgctcacccgccagcggtgctcgcaaaagaacagcagtggattatcctgcttgctgtcgctgtaaccgctgtacagcttcagcggcgcgccgagccgttgctccaactgcaccactttttgcacgcccaggcagcgcagggtcaagacccaaccgccgcagcggcgcgtgatgcggctgccgatcaaccgcacccgcggcagaaacgccgaatcccgatacacctgctccaccagttgctccggcgagccggtaatcagccacacttcggcatcgtgctcctccagatactgccgcagccgcatttgcaccaccggaaacgcggtcaccttctggcggaaagcctcgataaactgccgctccagcgccttcagcgtcgcttcggtacgcccgaaagtaatcgcccacagcagctggctcatcggccagcgcgcggcgcgccccagcagcaacagcgccagaccaatcaatggcaacagcggtatcaccagcagcagattcagcggtaaacggcgcagcaggaaacgcaagaaactgccgaacatatcctcctgatgcagagtgccgtccagatcgaaaaagaccacgcggcgccctgctgcggccgacggttgctgcttgtcgttcaaacgctactcctcgggatcgtcgaaccccatcatccaggtgaagagaaaaccggcgataatcgtaatcagcatccccgccagatacaacatcaccttacctgagacgatggtcaacgccaaaggcagccccgaaatgccgaaggtgatgaccgtcgccaccttccagtagctgatcagcgcgccgcctaccgcgccgccgaggcaggcgccgataaacggccggcccagcggcagcgtcaccccgaagatcagcggctcgccgatgccgagaatgccgaccggcaacgcccctttgatcaccttcttcagccgcgcgttgcgggttttcagcagcaccgccagcgccgcccccacctgaccgacgccggccatcgccaggatcggcaacagcggattggaaccgtgcgcctgcaccagctcgacgtggatcggcaccagcccctggtgcaagccggagagcaccagcggcaggaacagcccggagagcagcgcccccaccagcagcccgcccttgtcgatcgccagattggcgccgtgggcgatggcatcggaaatggcgccaccgatcggctgcaggatcaggatcgccaacgaggcggtgaccagcgtggtcagcagcggattgaggatcagttcgaccgactccggcagcagcgtgcgcaggcgcttctccacccagcacatcaacgccaccaccaacaatacggcgatcaccccgccgcgccccggctgcagcgcctccccgaacagggtgatctgcgccagcgccggactggagagaatgccggccatcacgccgcccatcgcttgcgaaccgccaaacacccgcgcggcgttcaccccgaccagaatgttcataatggcgaataccgcgctgccgaagatcgccagcagccccagcgcgttcgggtagtccaacgccagctgtccggcgatgtcgggccgcttcagcaggttgatgatgccggtgatcagccccgaggcgataaacgccgggatcagcggaataaaaacgtcggccagctttttcagcgcgccgctcatcggcgcagcgtatttttgcttggcctgcgccttggtgcgggcggcgtcaccaacggcgggctgcgcgctgccgctcagcaaggcgcgcatgacgtccaccaccttggcggcggcgcccggaccgacgataaactgatgctgttcaccctgtttgatatagcccttcacccccggcagctgcttgagggccgccagatccaggcgctgctcatcgctgacctcgacgcgcacccgcgtcatgcagttttccagtttgaggatattgccctcgccccccacgcccgccaggatctgtgtcgccaatgccgttgtcttgtccatcgccgcccccaccgtaaattaacgcgccagcgccgcgcgcaggtagccatcgtgccgctgcagccgctgctgcgcctcttcggcgctgacgccggctaaaatcatcaggatcgccggtttgacctcaaagccggtctgcgccaacgccgcctccgcctgagcgcgttcggcgccggtggcctccatcacgatgcggcaggcgcgatccaccagtttgacgttggtggccttcacgtccaccatcaggttctggtagaccttgcccagtttgaccatcgcaccggtcgacagcatgttgagtaccagtttctgcgcggtgccggatttcaggcgcgttgagccggtcagcgcctccggccccaccaccggcgaaatcgccacctgtgcttcgtgcgcaatcggcgaatccgggttacaggagatggccgccgtcgggcagcccagcccgcgcgcatagcgcagtgcgccgatcacgtagggcgtacgccccgaggccgccagccctaccaccatatcaacggcggtgaggttcagcgcccggagatcggcttcacccagggcctcgtcatcttccgccccctccaccgctttgagcagcgcgcccggcccgccggcgattagccccaccaccacgccgtgcggcacgccgaaggtcggcggacactcggaggcgtccaatacgcccaggcggccgctggtgccggcgcccaaataaatcaaccgcccaccggccttcagcgccgccgcggccaaatcgaccgcctgcgcgatcgccggcaacacctgttcaatcgcctccggcaccttgcggtcttcctggttaaagcaacggaccatgtccagcgtcgacatttcatccagccccatggtggccgggttacgggtttccgataccagtgcgcctaagttcatctgttcacctttgaatttttaattcacaaaattaaatcaatatttgaatattttattcaacaaagcgagcgctatttgctattttaacggtgagctcacaaaaattttcaccgcgcgttttcgccctctgcatggcaaaatggccgctggtttccagggaaagaacaatgagtacccttctgcgcattcgccagatgtatccgacactggcgcaaaacgaccgcaagctggcggactttctgctgaataacgccgagcaggcgcgccatctcagctcgcaaaagctggctcagttggccggcatcagccagtcgagcgtggtgaagttcgcccaaaagctgggctataaaggctttccagcgctgaagctggcgctgagcgagacgctggcccaaccgcaggccgaaccagtggtgaccgttcacaaccacattctcagcagcgatacgctgaaaatcgtcggtgaaaagctgctggcggaaaagcaggcggcgctgcgcgcgacgctcgacatcaacagcgaagagcggctgcaccaggcgctggacatgctgcgccaggcgcgccgggtgatgctgatcggcatcggcgcctccgggctggtggccaaggatttttccttcaagctgctgaaaattggcgtgatggcggtggccgaagcggatatgcacgtccagctggcggcggtgcaggcgctggacaaacgcgatctgctgctggctatctccttcagcggcgagcggcgtgaaatcaatctggcggcggaagaagcgcgccaggccggcgccagggtgctggcgctgaccagcttctcgcccaacggcctgcagcaacgcgcggaccactgcctctataccatcgccgaagaaccccacacccgcagcgcggccatctcctccagcacggcccagttcgccctcaccgacctgctgtttatggcgctgatccagcacgatctcgatcatgcccgcgatcgcatcaaacacagcgaacaattgatgaaaaagttggtttgacgcgtataatggcggccgataaaacgccgccagttcaattatttccattctctgcattcgaaaaataatgtgcgggcggtgaacagctcaattgtcggacagtaattgagcgtgcatggacggcattatttgacgatatcattatgaatacacacactgttattttagataagttacggcattctgtggctcatccgattctgcgtacctttttactctatgtcattactgcattgattctaatcaaggcgatgggatatagcggtggaaaaggcattgatattctgtaagcacacccgttttagttccacgcactttttgagatctaatccccagggaaagcctggcaccatttctacacaaacattaaggcgaagtcccatcaccctgcccctcctctcagtaaagacatcggttaatgttgaatgagacttagttttaattctctaataaaaagcccacttagcggcgggtcattctattgagtttagcttactctctatatgaaaaaggccaccacaagcggtgaccatttaaaattgattaatcaatcaattggaactcttcttgctcaagatatttttcaactgccttcttatcaacctgagcctcgagcttacacataagcctataattaacaggtgcatttgcctgcattgactctactttcaaatttagattagaaccagatgaggcgagaaaaattccaataactttagcaatataacgagggcagtaaccaataatctctactggtccaccagtacgaatcattaccgcacattcatcatattcattttgtggatcggggcaaagatatagcttttcaccatttttcaggttactaattctctcttttgccgaatctggaagatacgaaatcccatgagcgaaaaagtagtaatcgaaagttccatcgtcctgaatttcgattcgtttgaatacctgaagattatcagtagctctagccccaccagatcgggctaacatttccattgcagaaaactcgtttttatcaagaccaagccacttcataaactgagggtattctggtcttctcgctgatagcacacgatttttaaataaaggaaataactcttttgaggagtatgtagatctaatgtcatccatgccactaaagggaatgaagtttttaactttcatagcaccttttgtatatttaaacacataatcatcttctctctcatttaactggcctacaacatgccaatcccgagtttcgggtgactgccacgctaaaaatagtgagttatgcgttttcatagtttaacaaccttctcttattttccttcaacatctctaggacaaaagcctttgcatgcttatccatatactcatcagggattttactcacgatgctatgaaagtcttcatctgatagccctcttaatctttcaagccaaaaagctttagctttaggctttttttcaccagcacagtagaaagcttcaacagtaagcaatggcttcttatcgttctttagacggtagagcaaagacctagctttactaacgaagcactcaactctttgatttttatctttggatgttaacccaatgattcgtctttctgtcgtaagttctcttccaagactcgccgcatggtcataacttgggcaaaggaaacgttcacctgtatcaccattaactaaaatggcccaattttcatggtgacgatcctgattgctgatcagtgcatcaagcataagatagccacaaaacacatcccctgggctcaattcctcaagtcccaaggaagaaggcatgactttgatatgccccgcatctaagcagcctaaaacacggctaactgtatgctcacgcactttaacccttttctcatctacaccttctggtttggggtaactacctgattcaaactgatgcaggacttcgttccccattaccatgttaaaaccatcagtcacaaggttaggagtgattacacctggccgcccttcaaattttgccagctcgtaagtagcacatgggataccgagcttaaaacacaactgctctgcacacttttctgaccaatgctcccccgtgcccgctctcgaaaatttgaacagcatcttccctgtgcttgttgagtaccaaaatttttctttcgtacctaactgctccaaatcctggacatcagaagtgatctgattgatttcaaacatcatacgcccgaattaatgatttccacatccgtaagattatcactctatcttacatcagttttcatcaatacgagtcctaatttggaatcagcaaggaactgtttaaatatacagtacaaagaatgaaaattgaagttaaagaactcctacacaacaaaaaacccgctcagtagcgggtcattttgttgcatcgcttgatggtacagcttcgcgaaagcatacctgtgctatgcatttttttggtttattttgcataattattcaatttaaacatatatatacgcattaacagcgacgtataccgcagaattgaatatttcaatgcaccaacacccccgatcatccacctgatcgcgattcaaccaggaggcgtaatgattttgcatgtagcgccccagcaccgacaccgtattgcttcagcccgtgtagaacagtttccgatgatatagaccgggttatcgtgcttcatcgatgccagcaccactttttccatgaagttgcattcctcccgggcgtcagcagctaccagcatcaactcaagcgagcggtgcggccaagaactcatcattttggggatataatgcatctgtgttacagtgcgcggcattgatatttccttgtatcagaggccaccagcactaagctcacacatgaggttaaatctggaggctaaaaaagcatgtgttaccattctgtgttgctgaacatgggttttcaatgcttcaaacactgtataaatacacaaatagtgcgggatcgtgcgcaataaccaaagcctataaatgcatgatttaaacagactaaactcgtaagtgattgatatggcattattaataacaaagcggtgcatcaactgcgacatgtgcgagccggaatgcccgaaccaggcaatttcgatgggcgatgagatctaccagatcgataccgatcgctgcaccgagtgcgttggccattacgatacgccaacctgtcagcaggtctgccccatcgacaacaccattatcaccgatccgcagcatcgtgagaccaacgaacagctgtgggacaagttcgtggtgttgcaccacgccgatcgcatttaatccgccgcaggactgacaagggcgccataggcgccctttctattttcagctttcgacgatcaccgtcgcacaggcatagcgccgttcgtcggccagcgaaacgtggatcgcggtgacccccatctcccccgccagctcggcggcgcggccgtgcaaacgaatattcggcttgcccaacgcgtcgttgaacacctcaaactggttgaacgccaggccgttgcgaatgccggtgccgaacgccttggcggcggcctctttcaccgcgaaacgcttggccagaaagcgaatcggctgctggtgctgctggtacagcgcccattcggcgtcgctcagcacgcggcgcgccagacgatcgccgctgcgctccaccaccgcttcgatacgcgccatctcgacgatgtcggtacccagcccgagcaccgccattaccggcgcgcttcccgcatcagcactttcatgtcggcaaccgcggccggcagcccgctcatcaccgcctggccgataatcgcatggccgatgttcagctcgtgcatttccggcagcgcggcgatcggctgcacgttatggtaggtcaggccgtggccggcgttgaccttcagccccttctcggccgcgtaggcggcggcgaccgcgatgcggtgcagctcggcctgtaccgccagctcgccctgcgcttccgcgtaggcgccggtgtggatttcgatataaggggcgcccaccgccaccgccgcgtcgatctggcgatgatcgggatcgatgaacagcgagaccaaaatacccgcctgcgccaggcgctcgaccgccacgctcattttgtccagctggccggcgacgtccaggccgccttcggtggtcacttcctcgcgtttttccggcaccaggcagcagaaatgcggctgcagctcaatggcgatgtccagcatctcgtcggtcaccgccatctccaggttcatgcgcgtctggatggtctggcgcagcaagcgcacgtcgcggtcggtgatgtggcggcgatcttcgcgcagatgcacggtaatgccgtcggcccccgcctgttcggcaatgaatgccgcctgaaccggatccgggtattgggttccgcgcgcgttacgtaacgtggcgatgtgatcgatattgacgcccagcagcaaatcagccatgacaacctctaaatacgattttcagtgccagcagtttacacgcgggcgcagggcggcaaaaggggaaaaggtcaggcgtcgtcaaccggcgtattcggctgtttgcgcacgaactggcggaacagttcgcggctcttcaacggtttgccgccgaggtagggtttcagcgccatgcgggtgaaacgcttggcggcgcgcagcgtctcggcatcgggaaactgccgctccgccagcgcgcgcagttcacgcccggtgaagctgtagtgatccaccaccaggctggcgataaagcctttctcttcgcggtaacggtaggtcatggcgtcatccaccggcaggccgctgccggcgcagtgcaggaaatcgaggccgtaacccaggtgctgcaacaaggccagctcgaactgacgcagcgcctgttccggcgagctgtcttccgccgccagcgcctgcaggcattgcaggtagtcgaagaacagcaccgagtagttggtttcctgctccagcacgcgcgccagcagttcgttcacgtacaggccgctgtaaagcatcatgccgctgaggggtaaaccgagagagaccgcttcggcgttgcgcagcgttttcacttcgccgcggccgccccagcgcactaacaggggggtaaagggctgcaggcaacccttcagattggagcggcggctgcgcgcgcctttcgccagcaagcgcacccgcccatgaccttcggtaaacagatccagcatcagactggtttcactgtacggccgcccatgcaggacgaaagcgcgctcccagccgtccacggatcgttacttcagatcgtcaacatagcccaggctgcgcagcgcacgttcgtcgtccgcccaaccggatttcactttcacccacagctcgagatgcactttggcgtcgaacatctgttccatgtcctgacgcgcttcgatgccgatggttttgatcttggcgcccttgttgccgatgaccattttcttctggccttcgcgctcgaccaggatcaggccgtgcacatcgtagccgccgcgatcgttagccacgaactgttcgatttccaccgtcactgagtacggcagctcttcgcccaggaaacgcatcagcttctcgcggatgatctcggatgccataaagcgctgggagcgatcggtgatgtaatcttccgggaagtggtgttccgcttccggcagcagcttgcgcacgatgccggcaatggtgtcgacgttcatccctttctcggcggagataggcaccacgtcgaggaagttcatctgctggctgaggaacgcgatgtgcggcaacagcttggatttgtcggtaacgttatcgaccttgttgatcgccagcaataccgggcagcgcaggctgcgcagcttgttgaccaccatttcgtcgtcggcggtccagttggtgccttcgaccacgaagatcaccagctcaacgtcaccgatcgagctgctggccgcgcggttcatcaaacggttgatggcgcgtttttcttcgatgtgcagccctggggtatcgacgtagatcgcctgataggcgccatcggtgtcgatgcccatgatgcggtgacgggtcgtctgcggcttacgcgacgtaatggaaaccttctgccccagcagttggttcagcaacgtcgatttgcccacgttcgggcggccgacgatggcgataaatccgcagtgttgttttacttcgctcattcaagctccagctttttcagcgcttgttccgctgccgcctgctcggctttacggcggctcgagccggtgcccaccacgggctcgctcaaaccactcacctggcagtggatggtaaactcctggtcgtgcgcttcaccgcgaacctgcaccaccaaataagaaggcaacggcagatgacgcccctgcaaaaattcctgcaagcgggttttcgggtctttctgcttatcaccggggctgatttcgtccaaccggctgcgataccagtccaaaatcagacgctcgacggtctggatgtcgctgtccaggaacacgccgccgatcaatgcctccaccgtatccgccaggattgactcgcggcggaacccaccacttttcaattcgcccggcccaagccgcagacattcgcccaggtcaaactcgcgcgccatctccgccagcgtgttgccgcgcaccagcgtggcgcgcatgcggctcatgtcgccctcgtctacgcgaggaaaacggtgatagagcgcattggcgatgacaaagctcagaatcgagtcacccagaaactcaagacgttcattgtgtttactgctggcgctgcggtgagtcaaagcctgcagtaaaagctcctgctgttgaaaagtgtagcccagcttccgctgcagcctgtttattacgatggggttcatgagttaccaatagatcaagaatgcgtcaaaaacttgcagcacacggaacaggcctgcttcgccgaaagccgatccaaagctgtttcgtttgcagtggctcccagcaggagccaacttttatcgctcgagaaggtattctacaacgagtggaaacataatgctgtgtttatatcctcttaatctttcacgccgcagtaggctgcggcgtgaaattgacagggaataaatcagcgattaatgaatgccgccgatccggctgaaacgcacgccggtaggccactcgccttcctgtttttcaaagctcatccagatggccgtggctttgcccaccagattcttctccggcacaaagccccagtaacggctgtccgcgctgttgtcacggttgtcgcccatcatgaagtaatgcccggccggcaccacccactccgccaacggtttgcccggctgttggtagtaagcgcccacccgatcctgcgcgtccggcacggtcaggatgcggtgcgtgacgttgccgaggctttcctggcgctcacgcatgcgaatgccgcccgacggcacgttatcgttcagcgggatctggtagaagccgttgctggcctcgcccatgccgctgcggctgaacagctgcacgaagtcgctcggctgcgcatcggcgtaggtcacggccagcgcggtatcacaggactgcccgctgttgcaggacggctgcaccgtgacgcgcttattcaccggatcgtaagtaatacggtcgcccggcaggccaatcacgcgcttgatataatccagtttcggatccagcggatatttaaataccgcaatatcaccacgcttcggatggccggtttcaatgagcgtcgtctgggtaatcggatctttaatgccgtaggcatatttctccaccagaatgaaatcgccaatcaacagcgtcggcatcattgagccggacgggatctggaacggttcgtaaataaacgaacgcaccacaaacaccagcagcaacaccgggaagaccgatgcgccggtctccacccagcctggctgcttcgccactttcgccagcgttttatcgtctacggcgcccgcggtctgctcgttgaccgccgcaatcttcgcgcggcgggccggcgcccatttaaagcgctcgaagcaccagatgatcccggtgaccagggtggccaacgccaggatcagggcaaacatattcgccatgcaaactccctcgtttcgcgaactcgtcgcggttacttgccgtctttaccgacgtgcagaatggccaggaacgcttcctgcggcagctcgacgttgccgacctgcttcatgcgcttcttaccgtctttctgtttctgcagcagctttttcttacggctgacgtcaccgccgtagcatttcgccagcacgtttttacgcagctgcttcacggtggagcgcgcgatgatgtgcgtgccgatcgccgcctgaatcgcgatgtcgaactgctgacgcgggatcagatctttcatcttctccaccaattcacggccgcggtactgcgagttgtcgcggtgagtgatcagcgccagcgcatccacgcgctcgttgttgatcagcacgtccacgcgcaccatgtcggaggcctggaagcgcttgaagttgtaatccagcgacgcataaccgcgcgacgtggacttcaggcggtcgaagaagtcgagcaccacttccgccatcgggatttcataagtcagcgccacctggttgccgtggtagaccatgttggtctgcacgccgcgcttctcaacgcacagggtgatgacgttgcccaggtattcctgcggcatcagcatgtgacattcggcgatcggctcgcgcagttcctggatgttgttcaacggcggcagcttggatgggctgtcgacgtagatcacttccttgccggtggtttccacttcatagactaccgtcggcgcggtggtgatcagatccagatcgtattcacgctccagacgctcctgaatgatctccatgtgcagcagaccgaggaagccgcagcggaagccgaagcccaacgcggtggagctctccggttcgtagaacagggaggcgtcgttaaggctcagcttgcccagcgcatcgcggaaagattcatagtcgtcggagctgatcgggaacagaccggcgtacacctgcggcttcactttcttgaagcccggcaacgctttatccgccggctgacgcgcctgcgtcagggtatcgcccaccggcgcgccgaggatgtctttgatcgcacagaccagccagcccacttcgccgcagttcagcacgtcgcgatcgacctgcttcggcgtgaagatgcccaaacgatcggcgttatacacctggccggtgctcatgaccttgatcttgtcgcccttgcgcagcgtgccgttcttgacgcgcaccagcgacacgacgcccaggtaattatcgaaccaggagtcgatgatcagcgcctgcagcggcgcatccggatcgccctgcggcgcaggaatgtcgcgcaccaggcgctccagcacgtcgggcacgccgacgccggttttggccgagcagcgcacggcatcggtggcgtcgatgccgacgatgtcttcgatttcctgcgcggcgcgatccggatcggcggccggcaggtcgattttattcaacaccggtaccacttccagatccatttcgatcgcggtgtagcagttggccagcgtctgggcttctacgccctggccggcatccaccaccagcagcgcgccttcgcaggccgccagcgagcgggaaacttcataggagaagtcaacgtggccgggagtgtcgataaagttaagctgataggtctgcccatcctgcgctttataatccagcgtcacgctctgcgccttgatggtgatgccgcgctcgcgctccagatccatggaatcgagcacctgcgcagccatttcacggtcggtcaagccaccgcagatttggataatgcggtcagacagcgtcgacttaccgtggtcaatatgggcaataatggagaaatttcgtatatgcttcattataaaagtttttctgccttggtatttctgaattactcgcctatagaaacccgcatggacctaaagcgacagtgaatgggtgaggccgtcttgcacctgaatcgctgcattctacatgccacaccactgaaaacctagcgatcggtgcagtgaaggcattctattatgcgccgctaaatgttacagggcgccccggcgggtgaaaacagatgttaacgcggatgatgcggcctgaacccaaggcttgccggtgcttcgtggtcgtcaaactccggcgctaatacataaccggccacagcgcaataaaccctctccgaaattataaaaaaagaatatttggatcaacctcttagaattccattttgccccacttcctttaggaaaaaccccatatacgccaccaccgtccctcggatagaaagggcatgagctccgcgacaaaacattattcagggcactacatcggcagcccaccggggttcaccagcatatctgcgtacgttgattggaaggtgcattatgatcgataaagggcaaatgctgagccggcacgatttttcaaaggtcaactggggcatactggcggcggcggcgctgctgtttagcgtgggggcggcgctgttggtgctgccgctgctgagcagcattgacgaaagccaggtcatcacgctgttgcaagccggcgcgggcacgattttactcggctgtacgctgctggcgctgcggcattatctgcgtccgacgctgacctatcgtctgtacgagcacggcgtgcgggtctttgacagccaccatcacaaagagcgtttcatcccgtttgagaagatcggcgacatctatcgctttcgcggcggccaggcttttggcgggctgtttgacgttacggcgttccgcgccggtgcagatcagccttggtgcacggttttcagcaacgtcgcccactcgtggcgattggcggacgtgatcgtcgaccaacagctgcagcagcgcgggccgctggcgctgaatgcgctctatcaggggggaacggtgtcgtttcacactatagagggcgacgcgcgctggctgtggcagttgctgctcggcaagcagcaaggcacgccgaccgaaacgctgcggctgagcgccaccctgctgacgacggaacggggaaacgtgcctatcgaacagatccgcgcgttggaaaatcatccgcagcgcggcatccgcttattcgacggccagggaaatgtgctgttcgcgattaactacgattcgctgctcagcgccgatctattcatcgcgctgttggagcatatgatccacaaccgcatccccgcctatcacaacccggcgatgacgcggccatcggtttaaatcagcggggagttttccgcctgcatgcgcatcgcggtaggcggcaacccaatttgcagcaccaccggctggtaatcggcctgctcgcccagacgtcgggccaagcggcgagccagcataaaggccgcaccgccgcccaacacggcgccgactgccgccgaggcgtcgctgccgaaacaatattgcagcagcgtgccgcccaccatcatacccagcagcggcgtcaggtaaaccagcatggcggagcgcagcaggctgccttccgcgatgccgacctcgacgcgctgccccggttcaagcggctgatcgatatgtacctgcagctgatgctcggtttccggcaccagctcgttcagcgcacgcgcgccacagccggagcgcgcggtgcagctgccacagccggccttgggttcacagcgcagcagcgctacgccctgttgccacgaaaccaccgtggcccactctttcatcattacggcgataccttgaaagaaatgctgtcggcgatgcgcttggccgtcgccggcggcaattcgcccacaatcgtgatttcgttgcccgcgcgcacttcggtctgaatggtgcggcgcccctgacggtagtactgctgcccggctccgctgcccgccgggctgacgttgaccgagaagctgaacaggccgtcgctgtagagccgggattccaccggcacggcgacgttcggcaatttgcggcgattgcgcgccacctcgtccacgccggccggcagccagccggtgctccagctgagctggacattttccaccgccggcagcgacagcagcggcggcaggttggccttgagcagcccctgcatcgcgccctgcacctcggcgccgaccgcgaaggagatcacccgatattgctccagcgtttcgccgtcgcgatcgagcaaatccacccgcagcggcagcttggtgtcttcgtccatccagacgatgtagctgtagcgggaaccgtcgcgcgccaccacgcgcagcacttcacacggccgatcggcgatgcgggtgctgcccacggagatgaagtcgtaatacttcgccagacgggtgaaatcggcataaacgatcgccggcagcgcatcgacgatgtgatcgccagtgagcgtgaacggctccagaccgggttcgaagtagctgatcccgccgccgcgctgcaacacttcgcggcgcgggccatccatatgcagcagctggccgagcggcacgttgccgatcaccgcatggcgatagcgcaacgactcgattccctgcttgctgacgctgatgtaggcgagctcgtaattgagagaacggctggcgctgctcatctgttgcaataacgccccggacgcagttggctgcgccggggcgatgctggaatagagcaggctgcccgtcaataaacaaacggagaaccagatttgcttcattactgctgttgcattcctaaagactgagttccgggaacctgaatggcagcctgttgcgggttgccttgctcaagctgcagctgatccgaatgcaggcgacgttgcagttcatagtcctgcagcatggcgttgatacgcttgcgctgttcctgcacctgctgctgttggccgctgccggtggagaaactgtcggcaggaacgcccaggctgaccggcgaggcctgccccatgatcggcagcgtggtgaaggccggcgattcggacgcgttcgatgtcgcagaaggctggttgtagtgctgcacgccgacgatcaccgccagcgacacgcaggccgccatgccgatttgcgtaatctggctcgcccaaggacgcactttgtcccagaacggcattttctgccaggtgtgaggctgcggctgagattcctgaacggcggaaggcaccagccgggcgggttctttctcaagtgcagcggcgacgcgatcggcgatgtcgagatgcatcacttgtccgacatcacctcgcagtgtgtcacgtatcaggtgatagctctgccagctttgttgaagcgttcgatcttgcgacagagaactcaacagctcgctgtcgaacgattcaccatccatcagagcggaaagcttttctttctgcatgcctaagtacccttcctgtgcccgccattgctaacgctggatcagcggttgaactttattatcgatagcttcccgggcgcggaaaatacgcgaacgtacggttccgaccgggcaatccatgatggcggctatttcttcgtagcttagaccatccaactcccgcagggtaatcgccatgcgaagatcctcagggagagactcaatggtacggaaaactatctgtctcagctcttctgacaacattaagttctcagggttcgaaatttctttcagtgcgcccgcactttcgtaattttccgcatcgttggcgtccacatcactggatggcggacggcgcccctgagcaaccagataattctttgccgtgttcacggcgattcgatacaaccaggtataaaaagcgctgtcgccacggaacgattccagtgcgcgataggccttgataaacgactcctgcaccacatcgggcacatcgccctgcggcacatagcgggaaacgagactcgccaccttatgctgatagcgcactaccagtaggttaaacgacttctggtcgcccttttggacccgctcgaccagaacttgatccgttaactgctcgctcatccgaggtaaactctccccaaatccgtctccacgcgtaaaattgtactgccagccatacattattttcctgagcaagcactcgcttggagttcatatagaacacgaagttccatatcgccattgttttttctgttgatgtcaccctatccgtggcttttgcccggacagttaggctaacatgaaattcactcttcttctgcacacatcatacgttatgcaaccatcatctgaacatgttagcgatgtactgatcgtcggcagcggcgctgcgggcctgtcattggcgctgcgcctggcgcagcattgcaaggttaccgttctcagcaaggggccgctcagcgagggagccaccttttacgcccagggcgggatcgccgcggtgttcgatgagacggacagcattgcctcacacgttgatgacactttgattgccggcgccggcctgtgcgacaaagaggccgtcgaattcatcgccggcaacgcgcgccactgcgtgcaatggctgatcgatcagggcgtgctgttcgacaccgaggtcaacgcgcagggcgaggagcattatcacctcacgcgcgaaggcggccacagccatcgccgcatcctgcacgccgcagacgctaccggtaaggaagtagagaccacgctggtagggaaagcaagcgctcaccccaatatttgcgtgatggaacgccgcaacgcggttgaccttattacctcgaacaaaatcggcctgccgggcacccgccgagtggtgggcgcttacgtctggaaccgcgagctggagcgggtggaaaccttccgcgccaaaacggtggtgctggccaccggcggcgcggccaaggtgtaccaatacaccaccaacccggacatctcctccggcgacggcatcgccatggcctggcgcgccggctgccgggtcgccaacctggagttcaaccagttccacccgacctgcctgtttcacccgcaggcgcgcaacttcctgctgaccgaagcgctgcgcggcgaaggcgcctacctgaaacgcccggacggcagccgctttatgccggatttcgacccgcgcggcgaactggccccgcgcgacatcgtcgcccgcgccatcgaccatgaaatgaagcgcctgggcgccgactgcatgtatctggacatcagccacaagccggcggcgttcatcacccagcacttcccgatgatccacgaaaagctactgacgctgggcttcgatctgacccggcaaccgatccctatcgtcccggcggcgcactacacctgcggcggcgtgatggtcgatcagcacggccgcaccgatctcgacgggctgtacgccatcggtgaggtcagctacaccggcctgcacggcgccaatcgcatggcgtcgaattcgctgctggagtgcctggtttacggttggtcggcggcggaagacattctgcagcgcctgccgttcatccagcaggccaaacaggtgccgcactgggatgaaagccgggtggacgatgcggacgaacgggtggtgatccagcacaactggcacgagctgcggctgttcatgtgggattacgtcggcatcgtgcgcaccaccaagcgccttgagcgcgccctgcgccgcatcaatacgctgcaggcggaaatcgacgagtactacgctcacttccgcatctccaacaacctgctggagctgcgcaatctggtgcaggtggccgagcttatcgtgcgcagcgccatggcgcgcaaagagagccgcggcctgcactacacgctggactacccggatttgctgccggaagcgctgccgaccattttgcagccttaaactctgcaacagggcgccttatcggcgcccttttcctttcagtagaacaggtagaagtcggcgatcaaccggcggaaatcgtcggtatagctgccgtcggcctgtttgatcgccagcgcctgctcccgcagcggcgtttccttacgcgtcagcgccagcaacacccggtgccgcggcgtatcggcccgatcgctgacgttcactttcgccgccgtgtgccaaccgctttgctgcgccaggcgttcaaattcggcgccgatgtcgtgcggcagcaccacgcaaaacgttccttgctccaccagcagctgcgccgcacaggccaacagcgcgtcgtgcgttaaggtttcggtgtagcgcgcgttgtggcgcgcctgatcgcggcaggccaccgccggctcaaaataaggcggattgctgacgatcagatcatactcagcggcatgctgctgcgcataatgatgaatatcctgcgcatgcacgctgatgcgctgcggccacggcgattccgccgcgttttcgcgcgcctggccggcggcggcttcgtccagttccaccgcgtcgacggtcacctcgtcgccgctgcgctgcgccagcatcagcgcgatcagcccgctgccgctgccgatgtccagcacccggcgcgcctgccccaccggcgcccaggcgccgagcaacaccccgtcggtgcccactttcatggcgcaacgatcgtgggcgacaaagaattgtttaaaggtaaaccccccgcgacgcggggtaaaatcggctttcgatcgcttgctcacactcaccacctggctataaaactggcgtagcataaggcaatctgatcggcgggaaaagagcggctttccgcttaaataggtgaagatcgcggccaacccgtctataatcggcgccccaagtagaggtagaccatgacagcaaccactttttccgaactcgaactcgatgatcgcctgatcgacgcgctgcgcgacaaaggctacgatcgccccactgccattcaggccgctgcgatcccgccggcgatggacgggcgcgacgtcttaggttcggctccgaccggcaccggcaaaaccgccgccttcctgctgcccgtgttgcagcacctgctggactttccacgcaagaaatccggcccgccgcgcgtgctgatcctgacgccaacgcgtgaactggcgatgcaggtcgccgaccaggcgcgtgaattggctgctcatacctcgctggatatcgccaccatcaccggcggcgtcgcttacatgaaccacgcggaagtgttcagcgaaaaccaggacgtggtggtcgccaccaccggccgtttgctgcaatacattaaagaagagaacttcgactgccgcgcggtggaaaccctgatcctcgacgaagccgaccgcatgcttgacatgggcttcgcgcaggacatcgaaaccatctccgccgaaacccgctggcgcaaccaaacgctgctgttctccgccacgctggaaggcgaagcgatccgcgaattcgccgagcgcatcctgaaagagccggtggaagtggaagccgacccgtcgcgccgcgaacgcaaaaaaatcctgcagtggtactaccgcgccgatgacgtgcagcacaaaaccgcgctgctgatccacctgctgaaacagccggacgtgcaaaaatcggtgatcttcgtgcgcaagcgcgagcgcgtgcacgagctggccacctggctgcgcgaagcgggcatcaatacctgctatctcgaaggcgaaatggtgcaggccaaacgcaacgaagcggtcaaacgcatgatggatggccgggttaacgtgctggtggccaccgacgttgccgcgcgcggcctggatatcctcgatatcacccacgtattcaacttcgacatgccgcgcacggcggatacctacctgcaccgcatcggccgtaccggccgcgccgggcgcaaaggcaccgccatttcactggtggaagcgcacgaccatctgctgctgggcaaagtgggccgttacctgaacgagccgctgaaagcgcgcgtgatcgacgaactgcggccgaaaaccaaggtgccaaacgagaagagcaacggtaaaccgtcgaagaaagtgctggccaaacgcgcggaagaaaaagcgaaaagcaaagaaaaagccaacaaggtgaaagtgcgccatcgcgacgccaaaaacgtcggcaaacgccgtcaggcgaaggccaaaccggccggcgacgcgcaataaccgccactgttcaagaaaaaaccgcctgtgcaggcggtttttttatgggcgtttactgctgcgcgtaatgcgtggccaggcggtgcccctgcagccatttatccagctcgcggaactgcgccttcagctcgtcattctgcaaatgcgccggcgtttgcgagaaataaaactggaacgcaaaaccctgctgattgcgcgcccgggcatcggccccggcctgcaacagcaacagcgccagatgcggcgcattaatcttcgccgccagatgcagcggggtatcccccagccgatcgctcagggtggtgtccgccccggccgccagcagcagccgcagctgctcctcacgcccggccagcaccgccgccgcaagcggtgtggcgccggtaacggcattgcgcacgttcacctgcttaaccttggccagcagcaaccgcaggtactgcgcatcgtgcaatatcgctgcggtgtgcagcgcactgttgccgtccagccccgccgccgccgcatcggcgccgagatccagcaacgcctgcacgctggccggctgctgagaaagcaccgcccactgcaacagcgtgacctgccgatcgccccgttcgcgcaaacgatcctgcgtagcctgcgcatggatgccctgcgtatcgccgcgcgccaccgcctgagccagcgccagattgctgcggccgtcaaacggtgaaatctcctgccccatctgttgctccttagccatcatcagtaaaccggtcaccgcgaccagcgccagtaaggctatcgccagcgcccgccgcaagcgacgcccttcaggcattggccttcgcctcccacggcttttgttccgccatcgagcttatcaccttgtcgatgccgtgcgccgtcaggctgcgatcgagatgtttgctcggccgccagtcatcgataccggtcagggtatcgctgttggccaaggtgatgttgtggccaatggcgtccgggatcagcgaagtcgactcctgggtgctggtcagcatgtcatattgctcgctgtaacgacggatgccgccggcttcggcatctttcttcgccgccgtcggatcgatacccaggcgattcagggtgtaatccgacaccgcggccgcattgaaggtgaccgcgacggtgccggtcgccagcgccgccgtagccgccagaccgccgccgagcgaatggccggcgatcaccagcgcatcgccgaaggccgccttggcgcttttggcggcggcaactgcctgattgtactgcacatcatcataacccgtcgcctgccgcacgttgctcagccagtcgcgccagtcgttggtgccggcgaacgccaacacatactgcttgtcgttgctgtaaaccccggcctggaaaccgctgcccgcgtcgtgcaggctggcgggatcgatgccgaaaccgagcagtgcgttgtcgctcagacggttgaacccggcagcgccctggccgttcagcgagtaaacgtccttggccaacagcgccaacgcataatcgccctcttgcgattgttgtccccgggtcacgcccggcgcaaccgccgtcggcgccgccgcggagatatcgccaaccagcgtattcaacaggttctgcgcgttcagcgtgtactgagagggggtggccaccggcgcgggacttgccggcgcggctgcgggctgcgccgccggtgccgtctcggcgatggcgcgaggtgtagggatcgcggccaccggggatactgcagaggtaaaacttaaaggcatactcatgccgactccttgtcgatagactttttattgagcacctgaataggtactgaattagctatcggcaggtcggatgagttctgtatcaggaatgcttaactttgtgcaaattgtgatccacgtttggttttcggccgccaaacgcaaaaagggagccgaagctccctgattgactgcgccgccgattacaggctttcggtaaaggtgcgggcgataacgtcgcgctgctgttccggcgtcagggaattgaaacgcaccgcatagccggacacgcggatggtcagctgcgggtatttttccggatgcttgaccgcgtcttccagggtttcacggcgcagcacgttgacgttcaggtgctgaccgccttccacacgcacggtcggctgcatttccagcggcacttcacggtattcgatctggcccaggtcgctgaccgcgacaacctgatcttccgcgtagttggccttggcgcacacgcagcgagcttccgctttttcatcgtccagcagccagaaagaattcaccagcgcctggtcgttcgctttggtaatttgaataccggtaatcattatgttgcctccgtacaagggcgtaaaaattcacatcgtgagaaaacccaatcctggtttcggccatttggtaaaaccattgttgtcttgttgttctgtataccagcctgaccgggccagttctttgattaaagtcaatttttgccgggtaggcacagggcgtgaaggggcaaatttatgttttatatcaattttcccgtcgcgctaaaaaacaattatttttgtaaattttcaaaaataattgcattgcaaacggcggcgagaaatgaaaagcgggtttcgctgcgcgggccgacacggtaagctatagaccatgaattgctaaagaaaacaaaggagagcgtttatggccacctccctcacctggcatgacgtgatcggcaaagagaaagagcagccctattttgttgaaacgctcgcctttgttgccgctgagcgccaggccggtaagaccatttatccaccgcagaaagacgtgtttaacgcgttccgctttaccgagctggcggacgtcaaagtcgtcatcctcggccaggatccctaccacggccccaatcaggcgcacggtctctctttctcggtgcgccccggcgtgccggcgccgccgtcgctggtgaacatgtataaagagctggcaaccgacattcccggtttcgaacgcccggatcacggctacctgcaaagctgggccgaacagggggtactgctgctcaacaccgtgctgacggtggaaggcggccgcgcgcactcgcacgccaatttgggctgggaaacctttaccgataaagtgatcgccgccctgaacgagaaccgcgaaggcgtggtgttcctgctgtggggctcgcacgcgcagaagaaaggcaactttatcgaccgcaaccgccaccatgtgctgaaagcgccacacccatcgccgctttccgcccaccgcggtttcctcggctgccgccacttctcgcaggccaatcagctgctggagcagcaagggctcacgccgatcgactggatgccgcgtctgccgcaggcgtagcccagagacaaaaaaggcaccctcgggtgcctttctttatgccgttgccggggcgattacgccttggctttggagaccgcgaccatcgccggacgcagcaggcggccgttcagcgtatagcctttctgcatcaccatcatcacgtggttcggctggtgatcggtagattccatcatgctcatcgcctgatgcacttccgggttgaacggcacgttgacgtcgccgacgatttcgatgccgtacttgcgcaccacgtccagcagcgatttcagcgtcagctcgatgccttcgatcatcgcggccagttccggattgtttttatccgccagatccagcgcgcgctccaggttgtcgatcaccggcagcagatcgccggagaatttctccaaggcgaacttgtgcgctttctcgacgtccagttcggcgcggcgacggatgttctccgcttccgctttggcgcgcagcaggctgtcgcgctcgtgctgctgagcttccgccagttgggcttccagttcggcgatacgcgcatcgcgcagatcgacgccttccgccgcttccggcagcgtatcctcgtgatgagcgtgttgttccatttcttccgagacttgctcgtttggcgtcttctgttctttactactcatgaatatctccgcgttttagcattaatctcgcaacttggcttattatggggatcaaaaccggggtttcaagtcaaccggtcacaatgtggggcataaacggatcccggtgaggaaaatcacagcaaatgaataaaaaattcacctgtattggcattgttggccacccgcgtcacccttcagcgctggcaacccacgagatgctgttccactggctggtcgcccgcggctattcggtgatggtcgaacggcaaatcgcccatgatttggggctgaaagacgccgtgaccggcagcctggcggatatcggccagcgggccgacctggcggtggtggtcggcggcgacggtaacatgctcggcgccgcgcgcgtgctggcgcgctacgacatcaaggtgatcggagtcaaccgcggcaacctcggcttcctcaccgatctcgatcccgacaacgccctgcagcagctggcggacgtgctggaaggcgagtacattgacgaacagcgtttcctgttggaaaccatcgtgcataaagagcaccagcagtgccgcatcagcaccgccatcaacgaagtggtgctgcaccccggcaaagtggcgcacatgatcgaattcgaggtgtacatcgacgatcgcttcgccttctcgcagcgctccgacggcctgatcatcgccaccccgaccggctccaccgcctactcgctctccgccggcgggccgatcctcaccccgtcgctggaggcgatcgcgctggtgccgatgttcccgcacaccctttccgcccggccgctggtgatcaacggcgacagcaccatccgcctgaaattctcgcagatcggcagcgatctggagatcagctgcgacagccagatcgcgctgccgatccaggaaggcgaagaagtgctgatccgccgcagcgatttccacctgaatctgatccatccgaaggactacagctatttcaacacgttaagcaccaagttgggctggtcgaaaaaattgttctaaaatctgcgccggccactttactgtatataaaaccagtttatactgtatgaaactacagttatgtgtttatacacaggaaggttcccatgctggcgcaattaaccatcagcaactttgctatcgttcgtgagttggaaatcgattttcaaccgggcatgacggcgatcaccggtgaaaccggcgccggcaaatccatcgctatcgatgcgctggggctgtgcctcggcaaccgcgccgacggcaacgtggtgcgcctgggagccgcccgcgccgatatctgcgcccgcttctcgctggcggacaccccgtccgcgcgcgaatggctggagcagaaccagctggacgacagcaacgaatgcctgctgcggcgggtgatcaacgccgacggccgttcgcgcggctttatcaacggcaccgccgtgccgctgtcgcagctgcgcgagctggggcaacgcctgattcaaatccacggtcaacacgcccatcagttgctgctcaagccggagcaccaaaaagcgctgctcgacgcctacgccgacgaacccgccctgctggcggcgatgagccagacctaccaacgctggcaccagagctgccgcgagctggcgcaccatcagcagcagtccatcgagcgcgaagcgcgcaagcagctgctgcaataccaattgaaagagctgaacgaattcgcgccgcaggccggcgaattcgagcagaccgacgccgagtacaagcgcctggccaacagcggccagctgctgaccctcagccagcagacgctgcagctgctggccgacagcgacgagaacaacatgctcagccagctttacagcgccaaacacctgctgcttgagctggccgggttggacgataagctcagcggcctgctggacatgctggaagaggcctctatccagatcagcgaagccagcgacgagctgcgccattacgccgatcgcatggatctcgatcccaaccgcctgcacgagctggaacaacgcctgtcgcgccaaatcagcctggcgcgcaaacatcaggtcgcgccggaggagctgccgcagctgcatcagcagttgctggatgaacaacagctgctgtctcagcaggaaagcgaccatgaacacctgaacgaggcggtcaccctgcatcaccagcaggcgctggcgctggcggaagagctgcaccagaaacgcctgcactacgccgccgagctgaccacgctcattaccgacagcatgcaggcgctctccatgccgcacggcaaattcaacatcgacgtgcgcttcgaaccgcagcatctgagcgccgaaggggccagccgtaccgagttctgcgtctccaccaacccggggcaaccgctgcaaccgctggcgaaggtcgcctccggcggcgagctgtcgcgcatcgcgctggccattcaggtgatcaccgcccgcaagatggaaaccccggcgctgatcttcgatgaggtggacgtgggcatcagcggcccgaccgccgccatcgtcggccgcctgctgcgccagctcggcgaatccacccaggtgatgtgcgtcacccacctgccgcaggtggccggatgcgggcatcagcacctgttcgtcagcaagcagaccgacggcacggttaccgaaacccagatggcgccgctggataaacgcgcccggctgcaggagctggcgcgcctgctcggcggcagcgaagtcacccgcaatacgctggccaacgccaaagaactgctggccgcataaaaaagctcaactttttcactttcctgcggtctgacagtgacgctgttggcccgagaaatatctaaagtgcggcgcggcggtgatccaaagccatctcaacggcctgaaaaaggccaagcgcttgaggtgctaaaggaaagccaatgcgtcgcaacgtgaaagatgaagggtataaaggtttccaactgccgcaaggtctattatcatcggcatcctatgccctaaaggaatgtgattactatgcgctgtaaaacgctgactgccgccgctgtagttcttgtgatgctgactgcaggctgttctacttttgaaaaggtggtttatcgtcctgacatcaaccaggggaactacctgacgtcgaccgacgtggcgaaaatccagaaagggatgacccaacaacaggtcgcttacacattgggtaccccaatgctgcaagacccgttcggaacgcaaacgtggttctatgtgttccgccagcagcctggccatgaagacatcacccagcagacgctgacgctgaccttcgacagcgcaggcgtgttgaccgacatccagaacaaaccggcgctgaccaagtaatcggtgccgcccgctcttccggcccatgagggggcatgatgttcctcatgacagtcgcaggctgcaacgcggaagaaaaagtcagcttcagataaaaaaataaggcgctataagcgccttatttttttgccttttctgcccgttgccggcgcagctctttcggatcggctatcaagggccggtagatctccacccggtcgccgtcgttcagcgtatcgcccagcttggccgggcggctgtagatgccgattttgttgctcttgagatcgatatcctggcgcagctccagcaggcccgaagcctggatcgcctgctcgacgctgctgccctcggccagcttcaccttgcgcaggtactgccgctccggcaaggcgtacaccacctcgacctggatgtcagacactgtagacctctttcgcccgctgggtgaatgcctgcaccatgctgcccgccagctctttgaacaccttgccgaacgccagctcaatcagtttgttggtgaactcgaagtccaggtgcagctccaccttgcaggcctcttcgctcagcggcgtgaactgccagccgcccatcagcttgcggaacgggccatcaaccagctgcatattgatgctctggttatccagcagcgtattgcgcgtggtgaaggtcttgctgataccggccttggcgacgtccaccgcggcggtcatctcgttggaggtagcgttaagcacccggctgccggtgcagcctggcagaaaatcgggataagaatgaacatcgttaaccaactgatacatctgctcggcgctgaacggcactaatgcagaccgactgatctggggcatatcatttcctgtaagacataaaacgtacagataataccatttatctggcggcaaacaaaaaatctgctaagggatgagggaaccaaaaatgcgaaaaattgcgcaggtgctgaacgggaaaggatttctttcgctgaagcatccagtataatgaacgcactatgacaaagaaaaaagcacacaaacccggttccgccaccattgcccaaaacaagcgcgcacgtttcgaatacttcattgaagaagagttcgaggcgggcctgtcgctgcaagggtgggaagttaaatcgctgcgtgcaggcaaagccaacctcagcgacagctacgtgacgttccgtgacggtgaagcctacctgtttggcgccaccatcaccccgctcaacgtggcttcgtcgcatgtggtgtgcgatccgacgcgtacccgtaaactgctgctgaaccgacgcgagctggacaccctgctcggccgcgtcaaccgcgaaggttacaccgtggtggccttgtccctgtattggaaaaatgcctggagcaagatcaagatcggcgtagccaaaggcaagaaagagcacgacaaacgcgatgacatcaaagatcgcgaatggcagacggcgaaagcccgtatcatgaagcacgccaatcgttaagccgctggcttatcgaggtaaacttctggtatactgcacaaagttacttggggctgattctggattcgacgggatttgcgaagccctaggagcatgccgaggggcggttggcctcgtaaaaagccgcaaaaaaatagtcgcaaacgacgaaaactacgctttagcagcttaataccctgcttagagccctctctccctagcctccgctcttaggacggggatcaagagaggtcaaacccaaaagagatcgcgtggacgtcctgcctggggccgaagcgttaaactcaatcaggctagtctgtcagtagcgtgtccatccgcagctggccggcgaatgtaaagattggactaagcatgtagtgccgacggtgtagtaatttcggacgcgggttcaactcccgccagctccaccaaatacgtcgccagtgaaccagatagacccggcgataatagcgaaaaagcccacaacttcggttgcgggcttttttgtttttgtcgtattccgaaggctcgccccttggcccgggctgttccgggccaatgcgggctagtgatccagatagaggtaatgcagccagctggtcatgcgcagcagcactttgcgcatcacggagacgtgctcgaagtgcccggtatagaccgccgcctgggcgctcacgccgtcgggcagatgatccagatccgggttggctgccagatcgatcattacgtacaccccttcccggcccggcgtggcgctcaggccctgcagtgcgccactggcctggtagctgccgtccggtatcgccggtagcacccggctcacggtgccgccataaacctgtcccggcaagccgttgaacaccacttcagcctgatccccctgcgccaagcgcaggatggcgttctggcggaataccgccaccacctggcgcttttgctgcgggataaagatcatcaccggtttgaacggcaagcgaaccgccgccgtgcccggccgcgccagcacctgcgtgacataaccgtcgctcggcgcacgcaccaccgtttgttccaggttgtaacgcgcttcagctatttgcgatttcaggctggctatcgtggcgtcttcgccgtcatagcgcccggacaaccgagcctgttcctgttggaactgggctttcgccgcctgcagtgcggcggattgcgcctggtactgttgctgcgcatggctgacgtcctgctccgaaaacggattgactggcatggccgcccctttcgcgtagcgctggtaatccttacgggcacgctcgtattccgcgttcgcccgctgcacgttggcggcggactcgctaagcgccgcccggcgcgttctgatctccgcctccgccccggccagatccgcctccagcctggtgagccgcgcgtggtaacggctgtcgtcgagacggaacagcacctcgcccttgcgcagcagcacgttggttttctccgtcacttcaacgatcatgcccgagacctgcggcaccatcggcaccgacacggcaattttctgcgcccgatcgctgtacggatggttgtagttcatcgtcagaatcaacgcaccgacgataacgatcccgccgagtacggcggtcggcacggtccatttgttgaccggaatgcggaacagtttaaatacgccgtagctcagcgccacgtagctgagaataatgagcaaatccataggctacgctcaacttaccgtggggccgggaaccgccgtcggcttttcctgcaggcgttgtaattcggtttcgagcagtgcgatgcgcgcctgcagatccgttgaggattccgttctttcactcatgccccagccgcgttccggccgatagagcgtcgcccagatccacagcagtggccaaatggcgtgtagcgtaaacaggctgacccaaccggcaacgtgaatcgcatcctgatgcgggtgccggcgctttttcgccagcaaataaggaatgtcatgaataataatgacgccgtagaataatatcaggaataccgcaatcagtacgcctaaagcaaaatagttaagaaacatgtaaagtcctggttgagaataatggaaataaataatctctatagcgtgttatattgtctgatgtcgttggcgatggtatcgatggcgttcttcacgtcggtgactttcagctgtgctttctcattattaagattttctcccgaagccttacgtaccactttaatcactggctgattggtcgcggcatcgataaactcgccttccatatagaccgcgctctccatagtacggtgcccggttacgctttgcgtcgcggcgatcagcagcgtgattggcaagacttcatagacctgcagccctttcttctgcgtgtcgatcgctgtgatggcgccgcggaaaatcagggtatgctcgcgcggcatgtccaccagcgtaaagtgggtgcccatcgcctgcttaaactgctggttggtgtaattcaggatattgtcgagcgcgcgttgactcaccatttcgctcggtttcggccgcgggaaatagatcatcggttgataaaccaaatattgataacgggaaaaatcgacgctctgatctttccaatataaaacgtctttgccggacgcggattgacctttattgatatcgtcataattggtcagaaaggtcgagtatttttctttttcggtcacggcggacgagcacgcggccagtaataacagcgcaggtaaaataaccgctcttgtcactttcattgacggatttctctttatttttgtggatagcaaataatcaaatcgaatgatacccacccacccgtgataagtcatatgacaatgccgccaaaggtgtatatcatttttgatatacaaactcatgcgagccggccagtgaaagagaaagacttccgcattgaagaactcaggattgtccgcgtcattgccgaaacggcgagcgtcagcaaagcggcacagctgttggatatgccgcagtctaacgtgtcgcgcgccctcaccgcgctggagcgacggctcgggctggaactgttcctgcgcagcccgcgtgcgctggcgctgaccgagttcggcgaacaattcttgcgccgcgccgcactgctgctggacgagcatagcgatctgctcgatatgtccggcacctataagcgcagcctgagcggcatggtcacgctcggcgcgccgatcggtatccacgcgttcctggccagctatttgctgccgccggtgctgcatgccgcaccggaactgacggtcgatctggtgacccgcaatcccgatgaacgcgaaaaaaagtatggtgcggtgttcgacagcgactgcgatttgctgatcagcttcttccagccgcaaaacgaaagcctgatcgccaggccctttacccgttttcgcgtcgggctgttcgccgcgccggattacatcgcccgctcgccgctgaatgagctggatgaactgtcgcagcatcgctgcattaccttgcgcatgctgggcggcattcgcaatacctggagcggctacagtgcgcagggggagttggtgcaggtcgagatcaacggcgccagcgtctgtgataacattctgccggcgatcgagctggccaaacagggcctgggcatcgtctacgccccatattattccgtcgccgccgagctcgatgccggcactcttctgccctgcctggcgcgcgagcgcggcatcgatatgcaggcctacctgatctaccgccggcgcggcgtgttgccgcaccgcgtgcaggtgacgatggacagcatcatggaaagcgtcaaactgcacgcacaccggctgatatagccaaaaaaaaaccccgccacagcggggtttaacgcatcacatcagcgcaaaatacctcaccgcccctctttttcccccaggaagaaataccacagcggaatggaaagcagcagggtgaacaccagcgtatacagcagcaccatcaggctctgcatgatcaccatctgggcgctccaggcgccgatcggcagctgaaactgctcgacggtgccgccgaggatcgcccggcccatcacgcaaccaaccaccaccgcgaccgtcgcccccgccgcgcggaacttgcgcccctcggcgcggcgggcggccgcttctggcgtttcatcccgcaagccttgccgctggccgcgccagcgccatacgtccaccagcaacaacgccgcgaggctcacgcccatcaccggcagacaataacccagcgccgctgccaccagcagcgtaacggcgcgcgccggcagggaaagcgccagccaggcggcaatcagcgtatgcaccggatgctgcgcccccgccgccgggcggcggatccaccacatgcggtaacccagcgcaatcatcaggcacagcccgaggccgaacgccgccagcagcagctgattcggcaagccgaacagaatgcccatgtgggcgtcgatgccccaacgggtcagcttggcgatgagcgggaaggtgtcgaaccgcacctggtcgacgacggcgaagctctgcggcgcgatggcgaccgcgtccacctgcgttggccagctgcgatccacttcggtcaccgtccaggctttgccctcgcctttcggctggcgcagctctatcttggcggcatcgatcccggcggcgcgcgcggcatgcagcgcccgatcccaatcaccgttcagcgcattggcctgtgcggcagggttcatcttcatgccaggcatcatcccgcggtgctcggcgtgcggatcggccggcgtctgcggcgcatcggcctgcaggctggcgttgacctgcggcgttagccagcccaggttggcccgcagcgcgtcgatgttgccgccggcccactgcgaccaggtcagcccggtggccgagaagaacagcagcccggccagcagcgctacgcccagcgtgatatgccactgccgattggcggcgaaacgcccttttgcctttttcagcttgcgcttcggccgcgtcgccagccacagcgccacgccgcccagcgcggccacccacagccaggaagccgccagctcgctgtagttgcggcccagatcgccaagcagcaggctgctgtgcagcttgtccagccaggtgcgcagcggcagtacgccggaggtgccgtacaccgtcatgtcgcccttgatcgccaacgtgtaaggatcgacaaacagcgcgcgcgactcggaagcgcccagatcggcactcacgaactgcacgcgagtggtgtccgttgcgctgggcgccgggcgcacggcgtaaatgcgcgcctcggcacccgcctcacggcgggcagccgcgatctgatcagccagcgatctcgcctgcccgtgcggttcggtgaaaagcgcatcgcgatactgcgcctcttcaagctgcggggtcagcacatacagcgtgccggtcagtgcggcgacaaaaataaaaggggcaaccagcaggccgatatagaaatgcagccgtctgatcaggttcagcatcgcgccacgcggcgatgcggcaggtggagttttggttattgaagacatggcctttctcgtttttcaaactgtgcgcgcaggcaaaccgtccgcagcgatacgaacggcgttacccatgatcaagcattagggaaaaacggctggccgggcggcccgcgcgggctcggccgcagagtaaggcgccgaaggggcggggggacgatgcgcggcgcgcaaggcaggcgcgcgatgcgcgtcatcagccacagcagcgggacgaatgcccacagcagcagcggcacgtggatcagcagctcgcaatagccgcagaagatcatctctgccggatccatgccatggtggccggcatgttcggcggcgggcatcaccattccgtgcatctcatgctgcatggtagctgccggctgcgccatgccgctcatcatctgatggtgcatcagcgatttcgacaccaccggcgcaacaaacagcaacagcaccgccataatggcgatgcaggcggcaaagcgttgctgtagctggcgtggcactctcatcgcagcggtgaattaacccggtcggttgcgaacaagcggccagtgtaacctcaatgaacggtgaggtgaatgaaaagcgaaacgtgtgggatcagggagatctcccgctaacgatttgatatccgctataggctctcgacacgacgagggattgccggccgacgcttctttcttgctgccctcccaatcatgccctgggtgtttatattgagcctctttttattaactgttttatagtgcatatagaatgaaaacaaactcagcaacaacagcaataacgccaaaaacaataaaatcatcaatgcaccttgtattcaaaaatccatttacagctcattgccacgcaaaatcagccagttatagagttcaatttttcggttaaaaccgaattttttcatcacggccccacggtgggaactgacggttttaatgctgatattcagccgcattgaaatttctgccggcgtgagaccttcggccaacagacgcatgatttgttgctgacggtgggtcaaatcatcttcaggcgagttaacccggcgctgataaccaaaattctctcgctcacgccataaggtatccaggtagaaacgcagctgctgtaaactttctttttttaacaatgcctgctggaggcgtgccagtcgccatgtcgcaaggctgtttccccccccacccagtgaaaaaagaatggtatttttggtcgatgaccgtaaagccttaccaataaagtaggccatgtagttactcgactcataaaatataacatcagcgatctctagcctgtccttattgacaaaaatcacgttattatttttttcatcaaagtattcctttaagaaaaacatcaatccctggatgaaaaaacagtccccatccaacaaaccgatatagatctgcgacctcatatataccaccttacatccagcttcagaataattcatcctcaattcacatgaacatcactcgcctttcccaggtattcgggcagatgggggcgcgttattcctgacggaataaacatcttatattaaagaacgatacccgatgaaataacaaccaattaaacgaactcaaagtatctccagagttaatactgccgaagcactatagttaccaccgggtatgtcaccattcttttgaagctcggaagaaatcgtaacgttcttaccatcactcccgacatcatttatcgtcacccctgaacctgcaggggagttgtttatttttaattttgaatataggtttttggcactactcaaaaccaagcgccctgatgcatccaacccggaaacggctaatttcatgctattcttccgggtgcaggagacgctgaagttgctctctttataattgccatcaacattctcctgacttaacgcgggatgctgtataataatgttttgattatttatctgacaactaacaggttcaatcggcggctctactgagccgctgctcccccctccctgagcactagaacaggtgcccccaaaagatgcaaaatagggtgtcaaaccggtaacaccatcactataatttccccaggttcgtatccagacacatactggctcaccgcctgataaccaatagtctcttgattcacatgctgtcattagcttactgtcgatctgcgatgccataaaatcaagcgtagttcccttattaacatccacagtagccgagcaataggttgactgatagccgcttacttctatcatccaataagctgtgcacgtagtaagccctgctccttcagatggatagcacttaaaatttttctgcgcagaatacttatctttaacagtccctgtcggtgatatagataacacagatgccccatttgcttttttcacccacttctcatttaaagttaccgcaccagaagcatagaaagccgtaaaagaaaagatgaagaccatgcatcttatcattattatcaccctcagttataatccactcataacaccagaaagttcactaaactaaataataaacacatccaaactcatagccgcttatttaagcccctactcatattccagcctaaacgtcgccaccgcaccaaacgccccgcgcccaatcgtttttctctcgatcgcctgcggttcgccgcgcacataggcctgcaacgcgacgctattgccgccggcccgcaaactgtatttatcgctggttttattcatcggcagcgctttcccttccggcgtctccagcccgatagcaatccccttcgcctggctgtcggcgttaatcgccagcaggccgggcagcgccagactttccgttcccagcaacgttatcgccaccgttttccccaggctgacatcgcattccgtcaggtgaatttcaaacgtctgccccagcgtgcgggtattgaggtacaggtatttgtcgatgatggtgccgaaatccagtgcgatttcctcatcgcccggcgcgatcacgcacggctccgccaccagcgcgccatgcaggcgcaggttattcgccgccgccaaggccgcgccagcgttcaacactaaaaccgtggccagcaagtatgtgccaataatctttttcatcgctaacccttcctactgataatcggcctgcaacgtcgcccaggcctcgaatgccccctcgctcagcgtgactccttgtttttgtaccggcaccgcctccagctgcggtgggttatccaaggtgatgttcaacgtgctgcccggcgtgaaaggctcatcgtcccggtatatgcggatgcccaaatcgcttttgttggtcgccaacgcctgtttatcgaagccgctgacgccgcccttcagacttagggttagcgcccaattgccgttggtcgctctgtcgcaggcaatttggtagttcagcacctggcggtagttaaccccgtccaccttgttaatgccgacgcgctgaccgaagtccacatcaacctggctgccgtcattaatgcggcacggcggcggcgtaagcagtgtgccgcggaaagtcatattctccgccgctagcgcggtattcagcggccctataaggccgcctgtcaacaacagggctcgcatcgttttattcattttccgttcccttactggtaagccaccttcagcgtggcgcccgcggtaaactcaccgccgctgagcgtagtaccgctctgtttaatcggcaccgcccatagttccggtgcattcgggtaggtgaaattcagccagctattgagcgccagcttactgctgccttgctgtaattggatgcccagcgctgttttattggttttcaatgccgtcgagtcaaaggccgcaccggtgccctgcacctgtaacttcatggcatttttactttggccgctgcaggacagggtgtaacccaccgccgtccgataatttttgccgtctacccgagtggtcatgacttcgccaaaattcacctcgatcggccggtcgccgttaatcacgcagggcggcggcgccaccaccgtaactcttacggtcaccgtggtcgccgcctctagcatcagcggcacggtaatcaacaatgcgctcaggcagccgattcgctgtcggttccttactctcgttgtcgtttcatccatgttcagctccgcctcagtcatagctcagataaaagtccatcaccgcctggtagctgcccgccagcaaaccggccgccgtgcgttccggcgtgatggtgtagctcaggctgttccgccccggcgttaacagcagcggcgcacctctttcgcccagccgcacatcgcgcccgtgggcatcctttagccgcagccccaggccggatacgccgcgcgcctgcaccagctgcgggttattcgcatcacgcggcgcccggaaactcaccgtcaccgccggctggtcattggcccagaccaccccgccggtgcgcaggtcacggctgcccgccgggctgcgcaggcaatccgtcagccgcagttcaaagcgcaccggcgtgccgcgatcgcctgtctgcttcaatcgcccggtgccgacttcacccaacgcgatgtcctggcgcatgctgtccatctccagccgacaggcgctctcggtcagcgcgccctgcacatacagcacgccgttggcaccctctacctgccagttatccgccgcctgcgccggtggcaacagccacagcagcgcggtcaggctcaatggcgccatcaaggccaatgccgccagcacggcgtaatatcgcagctcgcttatccagtaagcgcgttccgccatcagctcctttgccatttatcctcctgtctacttttatctggttgcagcggttaatcgcctttcttctccggcaccaccttgcagatattgccgctgcagctgaagctcagctgcgggcgaccgccgtagtcgttaacgtaggtcagcaccgggctgttgcccaccaccgccgcgctcgccgtcagtggcaggctgcccttcggcggcaccatcatcggttcgaaagctttcaccggcgcgctcttgctgctgcccgcatccaccagggtgacgtagtacggcgtcgggttgttcaccacgtatttgtcgccctgccgggacagcgtcagctgttcctgcggcggcggcgcgttggtgtcgatgcccagccccgccgggcggtagaacagcttgatgcgcgtctgcagcgcgatctgcagggtgttcggtttgttgctcttcggcgggatctcgcgcagattgaagtagtagaccgtttcgcggtcctgcggcagctgtttggccgccggcagcgcctggattttcacctggctcggcttgcccggctcgatgcgctgcaccggcggcagcaccgtcagcgggctctggatcttgttaccctgctcgtcttcaatccagccctgcgccagatacggcaactgcttgttctggttgctgacactcaggctcaccgagttcagcgaaccgtcaaacaccacgcgggtgcgatccagggcaattgccgcctgggcaggcagcgacgcagatacgatcagcacggcccccgctgccgccacaatgtgtttttcggcaaacgccgcaaataaacgtttcgtatttttcataacaacctcaactcaataaatataaaagttcatccaatcaataaaagttcatttagataacattaaaaataatcactgcactgccggtaaagtcgcccgaggtttcttttttcagttccgactcatcgagagaggcaaacagctcgacgctacccttataaccgaccttgacggtcacatctcgtttgttgctgtcgcccggtgcatcaacggacagtttcactttgagctgctgtttattttgtggattggtcaacacgatggtgtcgccgccgctgcgattggcatcggtaaatattaagcgcgccgtcgcttgtgaggtgtaatcaccatcgcaaaccaacgatgccgtaatgctggcggttttagattcctggttgacaacgccaaaatcaatctcactgttacttaaaccatcgacccggcaaaatacgttgacggggggtagcggatctagcggttgtaaaccattatcagtcgatgcaaccaccagcgaaactggatcaaatttaaaataaacccaaacctttggtttgcaccccttctccgagaaatttttatttattaccccatgaacgggtagtgctttttttattctggcattgatatcatcaaagggataccattgcccattccacgtatcaatgactacaacctccatctcccgagcaaccggatttattacgcacctttgtccatcgtgattactccagaccgaaatagtacacctaccaccacaacgcaccccccaatcctccctaatgtaatcattgatgccatgatccttagctgaaaattccagacttgagaaattataatcgatagcagcctttccatttaaccaataccaatcagaaaacctcacatccacttcaaccgcagagcaaacattaaaaatcaacaacaataaaactgaaagaatatatcgaaaaaatctatttcccatttatgtatcctttgctttgcctaattgatggcaaggcagcaacaatgtattcatcaacagcaccgtcaacgaactctggatcttgttgccctgctcgtcctccagccagccctgcgccaggtgagggagtctgctttttctggttgctgacgctcaggctcaccgagttcagagaaccgtcaaacaccacgcgggtgcgatccagggccattgccgcctgggcaggcagcgacgcagatacgatctgcacggccccctcgtatttttcataacaacctcaactcaataaatataaaaattcatccaatcaataaaagttcatttagataacattaaaaataatcactgcactgccggtaaagtcgcccgaggtttcttttttcagttccgactcatcgagagaggcaaacagttcaacgctgcccttataaccgaccttgacggtcacatctcgtttgttgctggcgcccggtgcatcaacagacagtttcactttgagctgctgtttattttgtggattggtcaatacgatggtgtcgccgccgctgcgattggcatcggtaaatattaagcgcgccgtcgcttgtgaggtgtaatcaccatcgcaaaccaacgatgccgtaatgctggcggttttagattcctggttgacaacgccaaaatcaatctcactgttacttaaaccatcgacccggcaaaatacgttgatggggggaaggggatccaatggtaaattgccatcgtcggtagaagctaatacgtggtcaactccattaaacaagcgtagccatagacgaggtttacaggagccatactcagcattaacaaccccgctgagatatggcagcagctttttaaccatggcattaaactcatcaaatggaattcggcgatcttcccttgtaatcacaaaccctctgacaagcccagttggatgtggatttataatgcaacgcttgccatcgctatttgtataaatagatatctggcatgtccattgagctgaacagaaaacctctttctccgatatgttattcgcgccattaccaatagagtcttctttcgttatctccacctttaagaaattataattcactgcaggcttgccattaagccagtaccaatctgaatagctggcttcaacgatagctgcagagcaggcattactgatgaagaataataaagttaaagtaataagccgcaattttttattcctaacttgattttttcaccgcatgccccgttttatcacagggcaacaacagcgtattcatcaacatctccgccggcagcgggctcggcaggcgcacttcacactgcgccgccccgttccagcgcaccgtcatcgcctcaccggcgttgatgccgctgagatagacgctgccgccatcgttgacgatgccggtctcctgcttgcgggcgttcagcaccgtggcgccgaacggcggttcactgccgtccgccagcttgatcaccgccatcgccttggcccccgctatcacgccaaactgccggtagccgatggccccctcggtcagcgtcgcctgcaccaccgatgtggtcgcctcagcgttgtcgcccagctggttcagatcgatgctggccttgttgcggtaatagctgttcacgtcgccgatcaccgccttgccccagacgttggtgcggctggtgcgcccgtagccgcgcaccggcacgtccgccaccccctgggtgtcgatcagcatccgcgtgccgcccgccatgccgctgcggtgcaacgccccgccctccgccgtcagcgtcatcccgccctgggcgctcagccccaccgcgctgtaacgcccttcctggtagctggcgttggcgctcagccgcgcgatatcgccctcgcggctgtaatagccgctggcgttggcgccgctgcgcgatgtgccggcactcagctggtagttgctgcgctcgtcaagccggtcgtaatagctcacccggttcgtggtatcgttgcggttcaccgtggtgttgtagctcagcgtcgagcgctcaccccacggcatcgacagcgacaagtaggccccgtcgtccttcattccgttgtactggttgcggtacgccgacagcgacaggctcaggttgcggaaccggccgatatcgaaatagcgcgacagcgtcaggttgtagcgatcgttggccggcctgtcccagtaggtctcatggctgtagttgaggtagctgctcagcccccagtcacggaagtgcttgttgaaggtaatggtgtacatctccttgccgctgccgttgcggttgccgtagtagcgcgcgtccaggtactcgctcatgctcatgaaatcctgctccgagaagcggtagccggcaaaggtcacctggctgtcgtactcgtcgaagctcttcgaatagctaagccggtacgaaccgccgctcagcgccccctcctcctgcggcaaccgcgcccgcgactgggtagcgtcgaatgacagcgccccgaacgccatcaggtcacggcccagccccagcgacagcgcgttatagtcaccgcccgccagcgcaccgccgtacagcgaccagccgttgctcaccccccaggagaactcaccggtgccgaacagcggcccgcgcgcgtggtgctcccagtccgacggcttgcccgccgccagcttgaaacgcaccgagcccggccgcgtcaggtacggaatgctggcggtgttcatcacgaactcctgcaccgtgccgtcctgctcctccacccgcacgttaagctcgccgctcaccgcgtcgttgatgtcctgaatgcggaacggcccggccgccacgctggtctcatatagcacccgcccctgctggctgatgatgactttggcgttagtcttcgccacgccgaccacctccggcgcatagccgcgcaggttgggcggcagcatgttgtcatccgacaccaggctggcgccggcaaagcggaagctgtcgaacatgccggagtccaggtagctctcgcccagcgtcagcttcgagcgcagcgccggaatggcgcggtaggcgtagtagcggctccagtccagccgcgtgtcggtcggctgcccgctgccggtctggtggctgaggctgccctgccagtcggcccgcaggcgccaggtgccaaggttggcgccggcggtgccgttgccgctcaggttgtaactgcgggtaccgctgcgctgctggtgctggctctgtgcgttgaggttatagtcgaacagcagaccaggaatgccctcgtcccagcgcgacggcgggtcccagttctcggcggtgtactcgagaaacgcctgcgggatgttcaggtacagcgacgaggtggccaggtcgccgcgcatctccatgcccgccacgctgctctcgtccaggcactcgccctggtgccaccagcgcaaatccttcatcacgccctctttaaggcccagttgcgccaccagcgccttgttgatgcaggcgcggctgccgttcgggtcgtcctgcggcggatagaacgggatttgctgctccggcaaatcgttcttgttgatgtgcaccaccatgccgtaggtgccgggcataatgtaaccgccacgtgaaaactggctcagatcgatgttcttgcggtcatgcacgtccagcacgtcggtgttgaactggatctcgtcggcagcatacacctgtgccggaagggcgccgagcgccagggcgatgcataatcccagcgtattgatacgcaccatttttcctgctggtgatttcctcatgtccccgttcccttataattatttcttgtccctgcgctcttgtaatcagtcctcaccaccggcctcagaaataatccagcttgaaacggacggccgtgaaataatcgccggccttcggcgcatgattattggcgactaatttcagggcgtaattcagccgcatatcgccgggaataatgtcaccgcgcggcagagggtggcccggcgtggcgatattgccggcggcatcggtgatttgcagcgcaatgcccgacgcctcgccgcgcacgccaaataacccctcctcggcatcgccgtcaaaggtcacctgaaactgtttccagtctggcaatttattattggcgcgttccagcgtgcaattaaccagctcgatggcgaaagtttttatttggctttgcccgtcgcgaataatgtccgctatcggcacgatatccatatccacggtctgatagcggctctcgacggcaatggcgcaggcggtgtcgataatagcgccttgcatatttaccctgccccagccctgaatagcgctgcctgcctgtgcgaaagcagtgaagataaataggcaagccgccagcggaaatagcctgattttaatccacataacgttatttcctgataaagcgtttctgaaaaatgcatgcgggcaccccgcatgcattagcatgcttaattcacttcaatattgaagaaattaacgtggcttagttatacgccagggtaaagtcggccactgactggaactcaccttcagtcagtactgcaccagaagccacatcaccctgcaggtaggccgcgaaattcagggagttagagccattttgcagctcctgcgccttggttgccttgcccagcttgatcacctggccggaaccgtcggtaatggctacgctggcgccctgcgcggtaccggtaatacccagcaggccgttattggctttggattccatgccggtaaaggtcagtgtaaccttgtttttcagagggttaccagtgaccgcatcattttcaaaggtgcaattttccagatcgatagcgaagttgcgcggcgtagatttaccgccgttcagcagcgccactttggagatctggcccagctcaacggtctgatcgatagcttccggggaaatagagcatggcgcatcaataatagaaccggtgaaagtcactttaccgtgaccctggtcagccgcaaacgcagtagaagacagaccaaaggcaagcgctgccgccatcatgatgttgttcagtttcatagttcttacattccttagtaagtagaaagagttaaataagactcactttatctgcagaagataatgcttcccggcttactgccatttccgtatcagcacaggaacccttctgtttctggccttcaaaccagtgaggacaatctactaccacagctcacttcttgaaatataaaactgcaaattaaacaaaattaagaatatatataaattaaaaaccttaaaaatagattttaactccgattaaatgcgcaaattaaccgacctgtaaataaaaaaaccgatcaattcatgtttaattaaccaattatccatgcaatataagaaaattctaattccaatagccatgagacagttgaaaaaaaacgccagcagccacagtattaagcacggacagattatttacagggagcaacatgaaatacattataaataacgccatcatttatgatgcgcataaagggacattatcactcaacaagaacaacgatgataaaaacgtggttttattaaaaccttcacagcgactgttgtcgttgtttattgagtgcaataatgaaattgtagagagggagcgtttgctggatgaggtatggaataatcatggcctgacggcatcgaacaataacctgagcaattatatttcagggttgcgcaagacgctggctcagttaggccaggatgacattctggttacttacccaaggcaagggttcaagttcgtcgccgagtcgataacccttttaggggaggaaaaggatgaaaataatggcgaaacgccgaaagcgcatccgttaacggaaaagaaaaccaggcgtataaaaccgctcattctgcttctcctgcctttggccgccggccttgtcgccatcggcgtcgcgttgcattattacactgccaataatgatctgagctttattggtaaatatcgcagctgcaacgtgttcgccatcgacagtgcgcaggatatttcttcggccagacggctgctgagcgagtttgattatgattgcaacagcagcgccagcgtatatttatacaatcaggttgccgaggacgacagcacagcggccgtgatgacctactgccccagacagggcctgtctgcgtgcaaaacggtaaagctgcaacagtaggcatagtctattctgacatcagaatagtgccccgttagggcatcaacgcttgttgcaaataaaattgggggaacgattgtcggcaaagatgtattgctgatcattgatcttctcgaccgtaaacaagatgtctttccccaccaccgggaacagcttgtcgacttctttattattgtgactatcgtcattagagcgtcgaacgatgtttgtcgggcgcatcaagaagcgcccttcattcgcggtataagtcatggtaatggtgcgcgctatggtaaaacgttcattattataggtcacgctgccgttgataataaatgcgctctcccttgcatttatattgacaatactgacaaacaacactctggataacgaatgtttttcatcatgataatcggtgcggatcaccgcattgcattccggcatgaccggagcaaaaaactgcaggtagataccaaaaaatataaagacaactccaagaatcatcagtgatgcaaacaccccttttattgtttttttattttttgaaaacatagacattctcacaggctgcgttaatgttcttttcattttttgggcaataggcgaaaaaggtcgccatcgagtgcaaggcgctgagaaccaacgcaccgccgttataataataaaccgttgccggtttattacagtcaaagccgccttcctcgagggtattctttacatcctgcgccgaaatattcgtgtgcaccagcttgtggtggctgttaattatttcgatttcacaattagcaatacgctgagcgggtatgaactgcgccgtcgggatataaacctggcgcattcccacagccaacatcaccaggccaccgataaaaacggccattgccacgcagagccataaatactccatccgccgggaattctctttcccaataagtattttactcaattcaggcttttcttggtttcctgtctcatccgtgcgggcaacccccgcctgaagcaaaatcccctgctttggcaaggtgatcaacacttcaccttctcccagttcggtaaacgccttgcgcaactgagaaagcgcattattcagattattgcccgactctatttggccatagctgccccaaacctggctcaacaaaaactcgcggcttaatactttattatcgttccgtacaaacaataacaacaatctattaaccgtcgccgttaacgagactttagattgttcatcatcaataacgcagagctcagagatatcatcccggtaaataattctgttgtttatcacataagccatagcgcacctcttattgaacgctaaaatgatatcacaacgcaatttttataggaatattcttaataaaaataattagccttttaatacatgaggttatatttgaaggttataaaaatcatattattttctctgtcagagaatctccttgggttattcgttatcacaatcctcaaccttcagcgatgaaaccctgtttttgccttttctttccaccgtaacctcaacatgttggcccggcggcgtctctgcaaagatattcaaagcttcctgggcattatcaatcactttccctgcaactttattaatgatatcgccttcctgtaagccggcgtcgctcgcagcccccgagtgttttacacctgtcaccagcacattatatcgcccccccagttttccatggatagcggagacattagcagcttccacgccgatgcagccgcgaatgactcgcccatccgccacgatttttttcattaccttattcaccaggcgcaccggcaaagcaaaactgatgccttttacgctattcagatcctgatctaccgagaaaaccgacgtattcatgccgatcatttctccagatgcattaaccagtggcccgccggagttacctttattgatcggcgcatcggtttgaataaacgtctgtctgccaatgacgccgaagccgctgcggccaatagcgctaacgataccgtgtgaaacggagccaaccagattgtaaggattaccgatggccaaaacaaaatcaccgactttaattttcttttcttcatcgatacgaatgggcgtggtcgccgcaggatccagtttcatcacggctaaatcggtcagtttgtcgtagcccacgacgatcgcttctcttaccgtcgcgtcgctgagcagcgccaccatgttcttgacgccattgaccacatgataattcgtcaccacatgcccacgattgtccataataacgccggtgcccaacgggcaaccataaacaacatcattacaatctttagaatatatatatacaacggatgggagcgcgcgttctatcgccatactcagtgacaattcattcacattttgccggttctggttagcgaattgcttaaaatagagggtgctgacgactgcgccaataaacacgccaattaacatatgaataacctttttattcatcgcaccctcaaaatggcaaatggtttttataagaacattcttcataccgaaggttaaatacactgacaagcgaaaattgacgcagtcaacggcccctggctcaaatctctgctccccctggtttgaacacctttcctccttccctgcgaacctttcaaactccccgaaaaaacaacatactgatttaattaaactttaaacccatcacacgcattatttcgttccgttcctgcataaaaaaacggcattgtatgatcgccctcacaaacatgataacattatattgttataacaaatggcgacaacaaccaaaaggaacctctggatgaactaccctcttgttggcagcgccattgttgagcacagcggcggtttaaataacttacgccatgtcaccaactgcatgacacgggttcgcatgaccctggtcgatcctgcaaaagtgaatattcaggcacttaaaggcatcgaaggcgtgctgggcgtagtggaagacgatactttgcaagtgattgtcggcccgggcaagtcgtctaaagtggcgacggtaatcaatgaactgttggcctcgggcccgcaaacggcgccgctgagcgacgtagaacaaaaagcggcgctggcgcgcgagaaatcccgcaaacccacgcgcaccaaagccgtgttgaagcacatcgccaacattttcgttcccatcctgccgccgctgatcgccgccgggattttgatggggctgaacaacgtcttggtcaactccgccgcctcctatgcgctgacgcacgccattgcggccagcggcgagctttctccggcccagatagtgttggatcagcgccatctgctgggcctgagccaattccttgatatcgtttccaaagcgctgttcagcttcctggccatctataccggcgtcaccacggcaaaagagttcaacggcaacgccatcatgggcggcctgctgggcgccatcaccatcgcgccccagctgcctcttttggggctgctccccggccagggcgggttgatcggcgttattttctgcgtctggctgatgtgcgtgctggaaaaacaggtgcgtcgcatcgtgcccgacattctggacgtggtcttgacgccgacgatcgtgctgacggtgatggccggcgccttgttgttcgccatcatgcccgtcgccggcctattgtccaacggcatcctgcacagtttgaacggcctgctggccacgggtgggctggccgccggcttcgtgctggcctcgctgttcccgttcctgatttcgctcggtctgcaccatggcctgttcccgatccatctggagatgatcaatgcgaccgggcatgctccgctgttcgccatccagatcatgtccaatgcaggcatggtcggcgccgccacggcggtgctgctgctgacccgcgatccggtgatgaaaaaaatcgccaaaggcgccattcccacctcgatcctcgccgtaggggaacccaccatcttcggcgtgaatattccggcgggattcgcctttatcaccggctctatcggcgccggcttcggcggcatgatggtcgtgttgctcggcgtctccaccaatggcgtcggcgccgcaggtctgtcggccctgccgctgatcgccgacggcaaatatctgcagtatatcttcgcctggctcaccggctgcctggcggcctttgtgctgacttacatcaccggcaagctgcgcaaatacgatcgggaaagcgtctgacgggacgacaaacagttaagggagcaaaaatgaaagccatcatgttgatgttcgattcactgaacaaacatttgctgtccgcctatggcagcgaccgggccatcacgcccaacttccagcggctgaaagaaagaacggtgcgtttcgacaatttctacgtcggcagcatgccctgcatgccggccaggcgcgagatccataccggccgctataatttcctgcaccggtcctggtcgccgctggagccctttgacgactccatgccggaaattctgaaaaagcacggtatccacacccatctggttaccgatcacaagcattactggcgcgacggcggcgccacctaccactcccgttacaacacctatgagttcgtgcgcgggcaagagggcgatgcctggaagggcgtggtcgacaagccgatttatcattatgaatccggcgagccggaagagatcaaacagcgccgcatcgccagccgcacgcagcatcaaattaacgtgcagtttatgaaggacgaacaggatcacccgctggccagaaccatccagaaaggcctggcgttcatcgacgagaaccacgcggccgataactggttcctgcaactggagtgcttcgatccccacgagccgtttttcgtgccggaaaaatacctgcggatgtacggcattgacgacgccagcgttttcgatggctggccgccctattacttcgtcaccgaaagcgaagaacgcaaggacgccattcagaagtactacctggccttgctgaccatggtggacgactatgtcggcaaggtcctggactacatggacaaatacgatttatggcgggataccctgctgatcgtcaacaccgaccatggtttcctgttgggggagcatgagtggtggggcaaaaatatcatgccgctgtataacgaagtggcgaatatccccttcttcatctggcatcccgagcatccttatcgcggcgaagcgcggcaggcgctggcgcaaaccatcgacattcccgccacgctgctggatttcttcaagctggacaagccggcggatatgcaaggcgcctctctggtgccagcgatttgcgacgatacgccgatacgcgactatgcgctgttcggctaccacggctgccatatcaacattaccgacggccgttatgtctatatgcgttcaccgcaggtacacggcgccgaggatctgttcgaatacaccctgatgcccaccagcatcaaccgccggctgtcccctgaagaactccggcacatgacgctgcatccgggattccgtttcaccaagggctgccaggtattgcgcatccccgcctcttcggtgatgacccgaggcgccgatcgcttcgggcaccggctgtatgacctggcggaaaatccgaagcaggatcgtcagtgccgggatgccgccgtcgccgaacgtctgctgtccgccatccgttgcatgctggaacaaagcgacgcgccgccggaactctgggcacgctaccaattgtcggaccccgcttctccgctgttgggcgccgatcctgactgggtgccggctttcaaagattatgcgccgcaggtgcgctacggtatgttggccctgatgcaacatctggaaggcactcatcaaacggcaataattgataaactgaatgcttccgccaaatcctcatggaccaccgccgatctgtgggccttcgtgcagcaagaagtgccgccagaacagcacgccggcgtgttttataaactggcgctggaaatgcggcttgattgagaggtcgccccgccctttcggcggggcgactgcagaacagaaggaaaattaacgatgggacaagaactggactactcgcgcggcgccaagccgctgtatgcccagctgtatgacatcctgctggagaagctgaaaaacggcgaatatcggaagaacgacgtactgccgacagaagccgagtttgaagaaatgttcggcgtcagtcgcatcaccgcgcggcgggcgctggccgaactggtcgcaaaagggttggtcaaacgtcaggccggcatcggcaccatggtcatcagcacatcggaaaagcagagcgtcaagacccgaatcagcttgatcgacggccagcaaacggaggcgatagcacgcaacaatctgtccctggcccctgtgcagccgccggagcctatcgcgcagttgttcgacgccgacaacgcgctactgctgacgcgcaccatttaccgccaaaacgaggaaccggcgcaggtcaactatatctatctgaccccgcgtttaaacacgctgacgttgtcggatctggaaaaagggttgtactgcgcattggaacagcacaacgaaaacatcgatgccttcgaggacatcatcacggccgaactgccgacgccggaagactgcgcaatcctcggcgtttccccctcggtgccgctgctggtcaaaacccgcaaagggtacaacgagcagggcctactggtggaatacaccatcgccaagcatatcgcgcgttactatcaatacatcgtcgagaacagcaaatgagctggtggacgcagggaaaatcaccggattaccggtttacattagctaatgaacgcacctttctggcctggatccgcaccgcgctgacctttatggccgccgccgtcggcctggatcagttgacggactcaacatcgctgaaggtgttgatcatcgtgctggcgcttacggcggcggcgctggcctgctacgcctaccatcgctgggcgggcaacgagaaagcaatgcggcatgaacaagccttaggctatccacgcctgctgatttggctcagcacgggtctggcggcagggatattgctgacgctggccacattggttcggccatgaacgccgcttgtccgcagcgcgatcctggcctgcagccggaaagaacggcgttggcgtggcagagaaccgcattctctctattgctgctggcgcttatcaccgcgcgtaccggcctttaccgcgaagaatatgtgctcgccgcactgggctgcgcttcttttttcgtggcgatgctgttggtatttggctcttttgttcggcaaaaatcgctgatgggcgcgatggcgctcccgcttgtctggtcggcgtggtttaaaagattgctcagcctcgccctcttgttcaatgcgctgggtctcgcgctgcacagtgcgctcatgctgttataggaaggaagtattcaatgacggctacccacggttgtctggtgatggcgaagcccaccggatcggtttgcaacatcgactgcacctactgtttttatcttgaaaaagaggcgctttatcccgaacgccagcagaactggcgcatgtcagatgaaacgctggcgctgtatattcaacagcatatccatgctcaggatggcgagcaggtgatgttctcctggcagggcggggagcccaccatgatggggctgccttttttccggcgcatcgtcgaactgtgccaaaaatatgccggcggcaagcgcattcaacacgcgctgcaaaccaatgggctattgctgaacgatgagtgggcgcgctttttcgccgaacaccgcttcctgattggcatttcgatcgacggcccgcaagcgctgcacgatcgttaccgtacctcgcgctcgggcaaaggcacccacgcccaggtactggccgccctcactctgctgcaagaacacggcgtcgaattcaacacgcttaccgtcgtcggtaagcataacgtcggccaggcgcgcgaggtttacgaatttcttttggccgcaggctctcgccatattcaattcattccattggttgaacgcctgagcacggcggagagcgccgcgctgaagctggttatgccgggcgaaagcgcagccacgctggcgccctggactgtgccagcctggcaatacggcgagtttctcaatcagattttcgatatctgggtgcggcgggatgtcgggcgcgtctctgtacagatgtttgacgtggcgctatccgcctggtgcgaacagccgccggtgctgtgcgtattcgccgaaacctgtgggcacgccttcgctctggaagccaacggcgatctgtataactgcgatcacttcgtctatccggagcatcggctggggaatattcatcagcaagatatccgcaccttgaataacagcgagcaggcgcatgcgttcggccgcgcgaaaaagacgtcgctaacgccggattgccgccaatgcgaattcaggttcgtctgccacggcggatgccccaaacaccgcttcgccgtgtcgccgtccggccatcctgggcataactatctctgcccggggtacaagcatttcttccggcatatctctcgcgaaatgaacctgatgaaggacttgctcgccaacggctacccggaacaggccatcatgtacgcgttggctcaggaacagcgggccggcgccggcagcgccaaacccaatgctccctgcccatgcggcagcggtaaaaagcataagaagtgctgcggtgcgaaaaaataagcccaaaagcccggtaaacgtcaccgggatccttaacttgcgtcacgctacttcaccgccagcgtgaccgcgtcctgcttgaagccgtagcggctcagcggcgtgatcatcaccgacgtcggtcgcccttccaccgccagcgtctgcgtctcgcccgccatcaggtagtagttctccagcgtcaccaccttgcccgacggctgcagcgtcagctgcggcgccagccgcaccacgtgcaacccgccgttgctgagcgtcagccgaccgtccgccgcgctcaaccgcaggtcgtcccacggcgtcttgctcaccgccaccgatttcggctgcaatatcagcccgatgctctggcgcaccggcatccgcgcgctgttgtccaccgcctgccctatcccctcgaacgacgccttcagcatcacctcgtgcggcagcgccgtacccggcttcagcacgaagttcacctgctggctctgccccgcctcgatgcgcgctatcggcggcgacagcagtaccgccttgctgaaccctttgccatccaaatcctccaccttcgtcgccagcaatatcggctccgacgagctgttcctgatgctgaagctcacccgccccgggttctcctccagcacgatgcccatgctctccagctgaaacgacgccccggcggaatgcgccagccccagcgtcagccacagcccgcccagcagctgcgccaggctccgttttatcgtcatgattgctcctctcttctcatccattatcggacgagccgcccgccgcacggcagacgccatcgccctcttcgtacaacaccgacgggtcaaacgccgccggcaccgcgtaactcaccacgcattcgttcatgttcagacgccgcacccgcagcgccttgccgatatcgtcattcaccagcatcaggttgccctcgcctatcagcgtacccagcagctgcccccgctcgtcgtgcaccgacgccccggtcggcagcagcgcgccgctctcatcccgcagggtcagcagcagctggcgcacttcggtcacccgaaaacgccgctctgccaccgtgccgcgcgccagctcgaacgccgcttcggtgctgtccagccgcaggttcagcggcagcgacagcgtatcgacctgcgcgcgcagcggcatataaggcatcagcatcggcagcagcgcgtcgccggcaaaatccgtcatgccgctgccgccgcccgacaccctgacccccgactgtcccgccaccctcatcaccgcgaaggtgtcgccgatgcgctgcggtgacgtcacccaggtgccgttggccacccccagcccgccagacgatgcaagcgacagcgaggaactgccctgcccgctgtgcgaggcccccagcgacagccgggtatacgccgtctcgccgctcaggttgccggcgccctggtactcgccgtccgcgtcccgcgtcacgtccaggtagccgttcagccgctcgctcaccggcccctgccagctgccgcccagcgtccgctgattgttgcgccgcgactgcagccggctgctgacgctgcccgccccccagggcaggctcagcccggcgtagaccgccgcacggtcgtaagcggaagactgcaggttgacgctcagcgtcgcccttcccaggctgacgccgtacgccagcgcatgggtccagctgcgccggctgtcgcggtaatagcgttcatgcgacagcgagtaggtcagcgccccggcgctcagggtgcgccaggagagcgccgcgccgccgttgtagcgctgccgggccgccccttccgcctctgcgggcgggttcagcccttcgtccgcgtcccgaaagccttcggtgcggtactgcgacgacagcgacagcgccagatggggccccagcgccacctgcccctgagcctccagctgcacgccgggctgccggccacgggtgaaggtcgcgccgcccgacagccagttgccggcgtcgtcactcacactgccctgccagcccagccgctggtaggtgcgcgccagcagcccgcccgccgttatctgcccccggccgagacggaatgcctgctcacccagcagcagcgccggcggcgaggcgccctcacgcccggcgccgtacggccggtagcgccccgccgccagccgatagccgcccgcccggcccgccgggtcgccggcgtcgggggtgaccgtaaagcgttgccgccgcccgtcggtttccgtcaacgtgacctcggcctccaccccggccatcaccggccccagctcgctcagcgaaaacggcccggccggcagcagggtgcggtacatcacctgcccgcgctgtttgacctccagcgtcgccgggctcgccacgctgccctgcagcggcaccgtcagcgccgcatcaggtgcgccggccgccagggaaagcagctgcccgccgctgagcggcacgttgccgctcagcgcgccgccggcgctgaactcaccgagctgaacctccgccccccaggcgggaaagtctttgctcgccgaggtctcgtatacctcgagccggctgccgctctcgtcgttgctgtagcttgagcgattgcgcagcacccagttgcgcaggttgacgcccggctccagcatcgcctgcagcgtctgctgattgccgtagcgcccctgacgccggttggcgtacaggtcgtagttcagcagcaccgcatggccgcccgactgctcgctgcgcagtttgtccgcatcgaacgccgcctccggcagggtgatttccacccgaaaggcgccgggaaacacctgcaccaccgcctgcggccagtgcgaatcgaaacgttcgcaggcccccggcggcggcgtgacccgcaaacgcagcgtctgcgccagccgttcatccagacacagcgccccctgcgaatcgaaacgcacctcttcctggtaacgctgcgccgcattgacctccagcgtcacccggtgcacgcccggcaaaaaccgggcggtattgaaaaattcggcgatatccgcgttgtaccccagctgcgccagggttttgacatcaaatccggcggcagcggttttcgtcatcggccagaccaacaaaaacagcaatgccgatgccctttgcctgatagacacgtcatcttctctgggttaatgccgggagcgacagattcagaaaaagggggagagtcctcccccttgcgttacccatcagacattacagtccgaacgcgaaatccagcgtggtggagccgtccagattggtgccttcgccgatacctccgtgcatatcgccgcttttggccaggaaggcctccacactcagtattgcggtgaaggtcttgccgatggccagcgtattggcatttgaagcccagcccacgcgcttgccgtgttcgagttgtacgctacccgttggggaggagatcgtgctgtcctgggtcacgaacagtcgaccgagtttgccatcaatctgcgggtgataggctgttaccgcatagaaccccaacttgccggtattattgatgctaccgagaccgaaggtttttcccgtctcgctggcggtgcccagacggttatcgataacgttgaaggtcatcggcgtttcggcatcgcatttcacctccatgatgccgttaccatttatccccaggctgaccgctttgtccctgctgattttcgtatggttgatgctgccgtaatcaaacaccccgtcgttagggagtgacacctcacaggtcggcgccaccagctcccccaccactttgatttccgcgctcgggccggcggccagactgcccccggcgacaagcagcgtggacgctaccatcacacgcaatgcaattttattcatcagtcgacatccttatatcacttcaatccaaagaactttttcgggcactcaaatgccgtacgcgaaactgagcgtggaagagccatccagtttgacgttgtcggtaattgggcccttcatgtctttggccgaggccagataaggctcaacctccagcatggcggtaaacagcttgccactgttttgtacgttgcccgactttgcccagccggtgatgttgtttttatcgatataggcggaactgacggtggtgaacgccgtggtgcctttcttcacgctgaacagcgccgaaggtgcggcattaaccccagcgctgaggacgttgactttataataaccgagcttgccgtcgccattgacgttccccaggccaaagtgagcgctgccggttgcactggcggtcccctcacggttatcgaccacggtgaaattcaggaaggtttcggcctcgcaattaacgaccagctgcttttgcgacttggctaacgccgtggccgccgctgagttaattaacccattggacagcttacccagttcgaaaacaccgtcgttggtgatggacacctcacaggatggcaccgccatttgccctttcactttcaattccggcgacatagaggccgcagagacctgattcgccatcatcaggattgcggcgatgcttgcagagattactgtttttttcatcatgaatatccatactcatagttaatattatcccgttcaaaacagatgacaggatgttaagcggagataaaccccgttttgccactcaaattcactgtcgttacccatgccggcgtaaaaacaatgcatgaattgacgctgcgcacttattgcttgttattcagagcccaaaaacgaaattcaacgtgacagagccgtccagccccactttatcgacggcgagaatattggcgtccagaaccggcgtcactgaaatatccatggtgtaggtctggccggcggcgcgcgtcgcatccgccagcaaccaatcggtacgctcaccggaaatcagcgcggcttcagtgttcggcggcactgacgcattgcgtgaacgcaacgtagccgggaagccgtttacggcagagtgagacagccccaacagaaaatagccaacgggttgcccatccggcgcattgcccagcccgaaacggcgcagatccggctcattgcggctggccgcgcggttatccgtcggaataatggccagataggtatcgccttcacagcgtacctgccaggtttgtttcaaggtcggtaatctctgcgcctcaccccgagcgcctccccgcacggcgccataatcataaacgccgtcattaccggcgataacggtgcatcctgaatgttttattttcccggatactttcaactcagccgaaggcgcagcgataagttgaccggaaaaaagaacccataaagcgatcaggcttgtttgcaacagtctctttttcatcccagcgtggtttccattcccattaatccgcacgcttgcaattacgcaagccatcgatgagataaatagttctcacttcccctgacgcagaagcgataaacgttctctcattagataaccatcaatttttacttctcagcacggcttcgcctgcatcaatgccagcgacgatgcaggaaatgccaatttagcgtcccggaacaacaattgaaatataaagctaaatacggaggaaaattcagagcatatagcagaataagtagaaaaaaataggctaagacgactaaaaaacaataaaatcataccaacagacagacaaacgccccatgataattacatttaattaaccgccacagccacacattaaaaatatacacagcacattaaaaccgaaaaacagcccgaatgataactcacataaataattaatatagatccaacaaaaaatgaatgatgatatgccgtcactcccccctcagatgtaacgacaaaggctctcgtttctctctgcgccgttttctcattgcgggaatgagctgaaaatattcgacacggcagatggaacacaaccgcaatcccatcatgataaccatcggaccgaattggcaaacaacgagcggtttacagcgcccgcgaatagacccgagaggcttctccccaggggtgatagccgagcccgttataaacgaagccattacgctcgtagtacccctccagatcggtgcacaggtgcagctgcgagaagcccaaccggcgagtttccgccgccacatgctcaatcagcttggcgccgcagccccggccgcgctgcgtttcctctacgtagagcgcacacagccagggatacagctcaccgcggctgataaagtcgttggtaatcagccccgcacagccgaggatctggtcatttgccatcagcaggtaccactgcggcagcgggttggcggcgccgaggctgcggttgatggcgtcttcatacatcatcagcgtctctgccgtggcccagtgccgctgaaaatacgcaatggcgcgcggcgccagctcgggcgcttgccgcaccgaaatcatgtccatggtcattcccgttattcatgttgtcagcgtagaattatgcagcaatatgcacggtatggcagcggcattccgccgccgtcattcactccaaggagtcatcatgacgcaaaacatctatgacaatcagacctttttcgacggctatgcgcagctcagccgctcgcagcacggcctggacggcgcgccggaatggcccgccatccgccgcatcctgccggatttgcagggcaaaagcgtggtcgatctcggctgcggctacggctggttttgccgcagcgcgcgcgaacagggcgcagccagcgtgctggggctggacgtctcggaaaagatgctggccaaggcgcgggagatgaccgccgacgcgggcatcgagtaccgctggcaagatttggcgcagctgcagctgccgccggaaagttatgatctggtctacagctcgctgacgctgcactacctcgaggatcttgccgcgctgttcgccacggtttacgccgcgctgaaacacggcgggcagttcatcttcaccgccgagcacccgatctacaccgccccggcgcagcagggctggctgaccgacggcaacgggcagaaatcctggccggtcaacggctaccagcgggaaggccagcgcgtctccaactggctggcggaaggcgtcatcaagcagcaccgcacgctcggcagctatatcaacccgctggcgcagcaaggatttatcatccagcatttgaacgaatggggccccagcgcgcagcaaatcgccgctaccccggcgctggacgaagagcaggaacgcccgatgatcttcattctcgccgcccgcaaacccgcctgattctgatctgattcacccgcagtaaaccgttcacaccaccacagttggggaggccgcctccccccaacgttactcaccaatcggcagatacccctgccacagcggccgggccggcttgccgtgcgggttggcgcgcagatgaacgtggtagccctgtagcgcctgcaacagcaggcagtcgtccacctcggccaggtcatccttgtgctgctgcgcgctgtcgatcagcagcgcccgtttggctttctctttcgcctcgccggcagagcgcgccacaaacaggccgaactggtgcagttccgccagctcatcgctgcggtaaccgcccacgttaacgaaaaacagcttctcttcaccggcgaacggcgcaggctccaggctcacgtcgtaaccgtccgcccagtcgatgcgcgcataaccgtcgacatgcaccttgcgcttatcgccgaaccacttttcgcgcagcagcggatacgcctcatccggccgatccgccgccgcgaactgcacgtcgtgcaactcaatattggcgcccggtgccgtaccccccacataaaacatcaataatcccggcatgttagtctgctctccctggtgataatcgctgtataatttaatgcataacgaaacatctgccaacggtagcgccattctgtgttatcaataggtgaggtttaatctgttgtggaggaacgcatggcattcaatatcggtgattttgtacaacgcaccaccggcggcccaaagatgaccgtggtggcgatcgacggcgaaaccctggtttgcagctggaatgaactgggtaaagagcagcgcacggaggtgcaggccagcgaggtggcgctgtaccatgaagacggcgatttcggcgtctgctgaacgctcggggcgcgcgccgcgccccgttatcgcctcaggcgcgaatgtcctgataggctggcgtggtatcaaactcatgcttggcgaacgggcacagcggaatgattttacgctgctcagcgcgcattttctccaccaccagcgccaccagctttttgccgacgccctgccccttcaatgactcatccacccaggtgtgatcgataatggtcagcttgtcgccgctcggcacgaaagagatctcggcgatcagcttgccttgctcatcattgatataaaaacgcttgtcgtctgccaagattttatgatccatatgatttctccctatatttaagtgcgccgctggggcagctgtcgataacgcgtttcacctcggccggctcggcattgtccggcataatccacgggcggcgattcagggtaaaaatagccgcgttgccatgcacgcagttggcggaatggcggcaaactgcactgttaaaataaacgtcaatcttatcaccggaataacggcggtaaccggcggcggtcaattcctcatccatcatggcctcacattgcctgttttattgtttttgctccagagtcaagtataggcaataccgccggcttcaccacgcgtctcgcccatcgaaaaaagtggcgcaaccgcccgtcgccgctagaaaaaaacgtaaattgttctaatctttatacagtaagacaacataattccgacagtggctaaggagttcgaaatgggtgatagctcaaaagacggcgtaattctgctgtcccgcatattgctgatgattctgtttatcattttcggttggatgaaactggtcaacttcggtgcgaccgtcacggcgatggaaggttacggcacgccgatgccttatttggcggcgatcgttgccgtggtggtggagtttattttcggcatcgcgcttattctcggcctgtttactcgccctatcgcggtcattttcgccctctatgttttgggcaccgcgtttatcggccatccattctggaaaatgaccggtatggaaatgatgggcaacgaaatcaacttctttaaaaacatcagcatcattggtggtttgctgttgctggcggtgaccggcgccggccgttattcgctggactataaaatatttaataaataattcatcgatggccggcgatattcgccggccattttatttcggcaatcctttcaacgactgcgcttggcgtggcgctcaaagttttccgccctggcctgcgccgatttacgcagcgtgacgtagcaggcgccctcgccgccgtcgcgcggtaaggcgcggcaaaacgcctgcacctgttcaaactgcgccagccatttggcgacgtaactgcgcacgatattcggatggctgtcgttctgccgcccgcggccatgcacgatcagcagcgaacgcaggttttgcgcctccgcctgcacgatgaagcgaaacagcgcctgccggctggcttcgaccggctgacgcagcaggttcagcgacgcctgcggcgggtaacgcccgttgcgcagcttgtccagcacgccctgctgaatgccttcccctttgaactccagcggctgttcgcaggggatcacctcgagaaaatcggtgctgaggaagttttcctgccgcagccgctgtgcttcgcgccgcgcgcttttgtccaccgtctcctgcggccggaggtgcaaggtctgccgcccgttcgccagcggcaccacgtccgccatcgcctgttcaaaaaagtctttttcctgctcgctcatgttccacctctcttgaacggcagcctttacggccgggaatggggtcgattgtaagacgccttgccacggttgcaagccgggaattgtcagcggcatgtgtctcatttgtcgtcaacgggtgagcttgcgagcagttttcgctatactgctaagccatcattgagtgccgcaaaggatcgagcccatgacaatgcgcgagctggaaatccagtttcaaaatgcgatgaatgagttgcagagcagcttcgaacggcaacaccgcgaatggcagcagagctaccaggcgctgcagcaactgctggaagaagccaaacagcgcgaagccgcgctgcgggcgcagaatgaacaactggcgcgcaaactgagcaccgccagttcggtgccggaacaacatgcgctggtcaagcagatcaaaatgcttggcgcccatctcgacgcgttggccaaagacgcggccacctttaaccaccatctgcgccagcagagcgcggtcggtaatttcagcggcgaacagcattgatagcgggcgctgtcgcacagcgcctctccctcttctggcgtattgagagtgtaataaagcctaaatgacctggatcatcctcgccgtcctgatcgtcgtatttattatcggttaccgcattctgacgtccgacacccgcaaagccatcgattcgctggcccatctgctgagggtcaaaccgatgctgatcgaatcgatgatccaggaaatgggcggccgccaaagccagacctttatccgcatgctgaacaacggctacaccgaagagatgcaccaggccgcttacctgctgttcatctatctgacgttcatcaaacaggcggacgacgaacagattgccctgtggcgcgacgtgctgctgcgcgccgggctgtcgccggagctgcacgccgagcacaccgaagcggcgctgttttacttcgccgagctggatatcgatgcatttgaactggcgcagttccgccgcgcctacaatgagcgtttcaaccgcgaagcgttggcccacggctgatcgcgtcccccgggcgggggaccgattacaggaacatgctgtagaggtagcgcgacagcgcttcgcgcgagctgaagccgtgtgcgatgccgtaacgcaggttcggggcgtcgctgcttaaatccaggggaaactccagatactgctcgctggtgcgcaccggcgaggtcggcgtggcgaaatgcacgcttctctctttcaacgccgggtggatcaccaatgcggttctgcccatccgcgcttcgcgattcacatacacataatgcgtacccttgcggtagccataggcctgatcggtgacataatcacgctcaaagccggtattctccaacactttagccacttcatccggccgtaaatacatcgattcctcctctcattctggaccgctgagcgaccttaccgtaatcattcaccgaaacaacgattttctggggaggaatccgggtttcggactattcctgaatcagcgccggctgcgctgcagcaggcgcagggtgagcagcaccccgatcgccaccagcagcgccgccgccagatagatcgacggcacgcccgcttgcccaatcagcagcccggccagcgggccggtgatgcccaacgccaggtcgaggaacgccgaataagtgccgagcgccgtgccctggttctgcggcggcacctgtttcaccgcctcaacgcccagcgccgggaacaccagcgaaaaaccggcgccggccagcaacgcgcctgtttgcactatccagggttcgccggcctgccagatcaacagcagcccgacgatctcgaccagaaacgacgccagcgtcaccttcaacccgccgtggcggttgatgacgttgctgaagatcaggcggatgccgacgaaggcgcagctgaacagcgtcagcgaaaacgccgcgccgctccagcccttgtcggcgtagtaaagggtgatgaacgtggcgatgacgccgaagccgacggtgcccatcgccagcccgagaccataggcccagatgcggccgaacaccgcgctgaaggcgatgcgctgcccggcggcgatcgagacgtccggcttgccgctcgccaacagcagcgccaccgcgaccgccagcacgatcagcgccgccaccccggccaagccccactgctgattcaggtacacgccgagcggcgcgccagccgccatcgccccgtaggtggcgacgccgttccaggaaatcacccgtgcggtgtgcatcgccccgacccggccgatgccccacagcgtggaaccggtgctggcgaagctttcgccgacgccgagaaacacccgccccacgcacagcagcagcaggctgagccacggataaccgtcaacgccaaacgccagcgcgtaaaacagcccgctggcgccgcagcacgtcaggccgaacagcaccaccttcttcggccccagctgatcggcgtagcgcccggcatgcggacggctgaacagcgtggcgaagtattgcgcactgatgataaggcccgccaacaccgagttgtagcccaggtggtcatgcacaaatcccggcagcaccgccagcggcaggccgatggtcaggtagcagacgaaggtgaacatcaccacggacagaatgcgtcggttcagctggaagttattttctgcggtcatcgaaggtggctcgcatcggacggggtagacgaagccctccagcataccccgatgagatttgatgataaatgagagagtgataacgaattattatttcgctaacgattttgccgccacccgcgcgcgcagaaaatcgataaacgcccgcaccttctccggcacatggcgggtattcgggtagagcgcatagatgctctgctcggggaaacggtgatccggcagcaaccgctgcagcctgccggcgtcgatctcgggctgcgccagccacgccggcagcaacgccaccccggcgccatgcagggcgaacgccagcaatgccgcggcgctgtcgccggtaagcgtggcggcgtccgccaccttgaacagcaccgcttcgcgctgcggcgtgaccacctgccagctgaggggcgaactgagccggctgtgggcgatccactgcgcctgcgccagatccgtcagcgaatgcatcggccggtcggccagataatccggcgccgccaccggaaaaatggcgaagctgtcgatcaaggccgcgcggtggctggaatccgccagctggcccagacggatcgccacgtcgaagcgctccgagatcagatcggcatgataagaagaagacacatgctggatgcgcaggcgcggatgctggcgcgaaaacgccgccagcgccggcgccaccacctgcgcgccgtactccggcgtgctggtgatgcgcagcacgccgctcagcccgtgatgatcgcggcgcacgtcgtcgagcacgttctccgcctcctgcaacaactgcaggctgcgctggtagaagcgttcgccggcatcggtcagcgataatcggcgggtgctgcgcaccagcagtgacacccccagctcattctccagctgcttgacgttaaagctcaccaccgccttggtttgccccagcgccaccgctgctgcggtaaagctgcccgcctccaccaccgccgcgaagatcgccaggcgctgcaaattcagcatttcgccgcccttattgtcaaaatgattttgacagtgtaatcgcccgccgccgatttatccgcacttttccccccgctacactgcccgccttcaaccggaggcaccatgtcttatcgcagcaaagtggcaatcgtctatctgctcggctttttcgtcgatttgatcaatatgtttatcgccaacgtcgcctaccccgccatcggccaggcgatgcgagcatcggtcagccagctggcgtgggtcagcaacggctatattctcggcctgacgctggtgatcccgctcagcgcctggctggcgcagcgcatcggcgggcggcgggtgtttctgctctccctggcgctgttcatgctggccaccctcggcgcgggcaacgccgacagcatcggcgcgctgatcggctggcgcaccctgcagggcatgggcggcggcttgctgatccccatcggccagacgctgacctatcagctgtaccgcagccatgaacgcgccgggctgtcggccgccatcatgttggtcgggctgctggcgccggcgctgtcaccggcgctgggcggctggctcgtcgatcggttggactggcgctgggtgtttttcgccaacctgccgctggcggccctggccctggcactggcggcgttgtggctacgtgcggaaacgccgacggcggcgcgcaaaccgctcgacgcgactggattactgagcgcctgcgcggcgctgacgctgctgctgctcggcctgacccggctgagcgaagccggtcatcaggtttccggcgcggcgctgctggccgccggcctgctggtgctggcctattatctgcgccatagcctgcgcaccccgcagccgctgctgaacctgcggctggtcggcgatccgctgctgcgcaacgccatggcggtttatttgtgcattcccggcctgttcatcggcgtcagcctggtggcgatgctgtatttgcaaaaccagctggggatgcccgccgcgcaggtcggcggcctgatgctgccctgggcgctggcgtcgttcctggccatcacgctgaccggcaaaagctttaatcgcctcggcccgcggccgctgctgatcgccggctgtctgttgcaaggtgccggcatgctgacgctggcgcagatcgatcaggccgggcagcacgcgtggcagatcgccgccttcgccctgatggggttcggcggcagcctgtgcagcagcaccgcgcagagcagcgcgtttctgcagatccccgacggccaattggcggacgccagcgcactgtggaatatcaaccgccagctcagtttttgcctcggcgtggcgctgctcagtctgctgctgaatctgctgctggccgtgttgccgcccgcggcggcttaccgaacctgcttcattctggcgggcgccagcacacttatcccgctgttgctgtgtctgcgcctcgccaaccgcgccatcgtgcgccaactcaacgctcaacaggatgctttatgaacccgtattttaccgaagtgatcgacgcccacatcgccattgaacgctggctgggcaaaggcgccggagaggagcaggcgctgctggcgcgctttacgccggatttcagcatgatcgcgctgaacggcgccacgctggatttcaccgcgctgtgcgcttttttccgcgcgcatcgcgccgccaaaccgggtctggaaatcgagatagaagagatgaagctggtggccgaatggccgacgggtgcggtagtcagctaccgggaaaaacagagtctgccgggacaaagcgccacgctgcgctactccacggtggtgtttgaacgccagcgcaacgcgctcggctggcggcatttgcatgaaaccgccgcggcgcaatgatcacaaaaagctgccggccaaaaacagttcccagccgacgatcaccccgcacagggttaccgcgctgaaaatgacttcaaacagatagcgattgatcatcgtgcgtcgcctcaaaagaagacacccggaagaaccgggtgtctggagtacggactggagcgtgcggaacctttcggttccgcaaacatcacttaattacgcttttttaccggcttttttgtggtgttttttagcggcctgagctttctgcactggcgcttttttgtggtgctttttagctgcctgggctttctgagccggcgcttttttgtggtgctttttagcggcctgagctttctgggctggcgcttttttgtggtgcttggctttcttgtggtgcgtcgctttagctggcgctttttcagcagccgccgctggcgcagcggtagtggtggtcgcagctggcgcggtggtggtagccggagcagtagctgcagtatcagcagcgaaagcaacagaagacagacccatagtggcagcaacgatcagcgctaatacttttttcatctttaaatcctcagagtgttgtttcggtaagctccggtggagccgttgaaacagatactagtggaatcaaaccgccgcttccgtgagtgattggtttcgccgagtaaccaaatgtacaaagcccaggtgccggcaaacacctgcgtgacggcggtttttttccgtgatcggccacgcaaatctcgacatggtctacacttaaaagacatgtgtcgaaatggagagctgaatgtttaagaaagcggaaagaacagaacgcgacatcgatcaggacgtcactctgttggccgatacgctggatgaagtgttgcgcgagtccggtgacaagaccaaagaggaactgaaagagctgcacagcaaggcgaaaggcgtgttgcgcgacgcccgggcgcggttcaatggctccaccagtctgacacagcatgcgcgcgacgcggtcgatcaagccgacagctatgtgcgtgacaaaccttggcagggcgtagggatcggtgccgccgtcggcatcgtgctcggcgtgctgctggcccggcgttaacacccctgcagtcataaagataaaacagatgtgcgtctggcccgcggaaatcgcgggccgtttaatttgcgtgtttaaacagctgcgctagcccctgcaccgcccgctccgcctcctctcgccggctgaaattggcgaaccccaacagtaacccctgccccgccggacgatcgatttgccaatccgacaacgcctgcgccgccagcccctgccgccacgctttcgccgccaacggcgcatccgccagcccgtgatgcagccgagccaacagctgaatgccgccctgctgcggcaccaccgtcagccaggcccccagctgccgttccagcgcctgcgtcaaccactcgcgacgctggcggtacagcggccgcatgcgtttcaggtggcggtagaaatgcccttggcggatgaaatccgccacgcttgcctgcagcagcggcgggcagccgcagccgcgcagccggctgctgcgcgcgaatgccgccgtcagaccggcgggcaccaccagataagccatgcgcagcgccgggaacagcgttttgctgaaagtgccggcgtacagcacccgcccctgaacatcgaggcttttcagcggcggcaatggtcgcccgtgatagcgaaactcgctgtcgtagtcatcctcgaggatccaggccccgcgctgctgcgcccagtcgagcagcgccatccgccgcgccaggctgagcgagacgccgagcgggctctgatgagtcggcgtgaccaccgccagccgcgcctcgggctccgtcaggataccggcggccacgtccattccctgttcatccaccggcacggcgaccggcctcacgccggcggcccgcagcagcgggcgcgtaaccggataaccgggatcttcgatccataccgcgtcaccggcgtgcaacagcgtctccaccacccagtccaacagcgccgggtagccggcgcagaggaaaatctgctccggctggcagctgatgccgcgcgacaaatgcagataatgggcgatcgcctcacgcagttcaggcaggccgccggccggcggcagcgccagggaagccaccgtagaaccgcgcagctggcgggcgacaatgcgctgccacagcgcacgtggaaacgcatccagcgccggcacgcccagttggaaaggctgcagcatgccctgcggctgcagcggatcgggcgccaccgccggcaacggcggtgcagcggacgccgccccctgcatgggcggcaactgcggcgagacataggtgcctgcctgcccccggctctgcaaaaaaccttcggcgatcagttgagcataggcgctttccaccgtggcgcgcgccacgccaagatcgctcgccaacccgcgtaccgaaggcagccggctgcccgccgccaggttgccctgggcgatggcgtctttgattcgcagataaatctgccggtacagcggttcggcgagacggctgtccaaacgcagcgaggtcaggaaagttggcatcatggcccggttaaataatcattttatggccctatagcatagaccataaggccgctaaagtagcgccatgatttcgttactatcgattgaggttgaccatgattaagcaacgtttgaattacgccgagctggcgcccgccccgtacaaaaatatggtgagcgcgctgatggcgctggagaaaggcgctctggacaaagcgaccatcgagttgatgtttatgcgcgtttcgcagatcaacggctgcgcctactgcctggacatgcacggtaaagcgctgcgcgaaagcggcttcagccacgccaaactcgatacgctggcgggctggcgcgtcagccatgagttcagcgagcgcgaacgcgccgcgctggaatgggccgagtcggtgacgctgatcgccgccaccggcgcgccggacagcgcttttgaggcgctgaaagcgcacttcagcgataccgagatcgccgatctgaccttcgccatcagcatcatgaacgccttcaaccggctggccgtcagcatgcgccaataatgcgttcgcctccccctcttctctgagaggggggaatttcccacccgaaaaaaaattttcccctcgccttcccagctccgacgcggtctgcgcacttaaccccacaaaacaccatatatagcgtggttgataaaacaaatatcaacatatagtattttataggtcagccgcagggaatgtcgttcggttgataacgccgtcagaaacgccaggaacgatgctccgttatctgacttgtccgcctttccttcagtctaaaggtaaatgcgaatcatgagcattattatttacagtaagccggactgtgtccagtgcaacgccacctatcgcgcatttgataagcaggggattgattatcaggtgatcgatctcacccaggatcagcaggcgctgaaccacgttaaatcattgggttatcagcaggttccggtgattatcgccggtgacgatcactggtccggtttccggccggacaaaatcggcgcgctggcgctcacctgctgaggctcgacgatgaatccgctggtctatttctccagcagttcggagaacacccaccgattcgttgagaaactgggcctgccggcgatccgcattccgatcgccggcgcccgcagcaaattgctgatggaacaaccctatatcttgatcgtgcccagctatggcggcggcagcgccgtcggcgcggtgccgatccaggtgatccgctttctcaacgttccgcaaaaccgttcatacctgcgcggcgtcatcgccgccgggaacaccaacttcggcgcagcgtacggcatcgccggcgacatcatcgccaaaaaatgccaggtgccttttttgtaccgcttcgagctgctcggcaccgcgcaagacgttgaaaacgttcgacagggagtaaccgcattttggcaacgacagaactgaccaggcccgagacgggcgcgctggattaccattcgctcaacgcgatgctcaatctttacgatgcggaaggccggatccagttcgacaaggatcggctggcggcgcggcactacttcctgcagcacgtcaaccaaaacaccgtgttcttccataacctggaggaaaagctgcgctatctggtggaagaaggctactacgagccgcaggtgctggcgcagtacgagttcccgtttatcaagcagctgttccagcaggcctacgccaaaaaattccgcttcgagaccttcctcggcgccttcaagtactacaccagctatacgctcaaaaccttcgacggcaagcgctatctggaacgctacgaagatcgggtgtgcatggtggcgatgacgctggcggcgggcgataccgccctggcgcaggatctggtggaggagatgatttcgggccgcttccagccggccacgccgaccttcctcaactgcggcaaacgccagcgcggcgaactggtctcctgcttcctgctacgcatcgaagacaatatggaatcgatcggccgggcggtgaactccgcgctgcagctgtcgaaacgcggcggcggcgtggccttcctgctgagcaatattcgcgaagtgggcgcgccgatcaagcgcatcgagaaccagtcttccggcgtcattccgatcatgaaaatgctcgaagatgccttctcctacgccaaccagctcggcgcacgccagggagccggcgcggtatatctcaacgcccaccacccggacattctgcgttttctcgacaccaagcgggaaaacgccgacgagaagatccgcatcaaaacgctgtcgctgggggtggtgatcccggatatcacctttgagctggcgaagaacaacgaggagatgtacctgttctcgccctacgacgtcgagcgggtgtatggcgtgccgttttcggagattgccgtcagcgagaagtaccgcgagatggtggacgacaagcgcatccgcaagtcgcgcatcaatgcgcgcgaattcttccaggtgctggcggagatccagttcgaatccggctacccgtatgtcatgttcgaggacacggtcaaccgggagaacccgatcgccggtcgcatcaacatgagcaacctgtgttcggagatcctgcaggtcaaccgcgccagtacgtatcatgaagatctgagctacgatcgcatcggcaaggacatctcctgcaacctcggctcgctgaacatcgccaaaaccatggacgcaccggacttcggcaaagcgatcgagaccgcgatccgtgcgctgaccgcggtggccgacatgagcgacatccgctcggtgccgtcgatcgccgaaggcaaccgcagcgcccgcgccatcggtctcggtcagatgaacctgcacggttacctggcgcgcgagcgtatcttctacggctcggaagaaggcatcgacttcaccaatctctatttctataccgtggcctatcacgccatccgcgcctcgaatcggctggcgatcgagcgcggcggcgcctttgacggctttgagcactcgcgctatgccagcggcgagtacttcgacaaatacaccgaacgcgactggctgccgcagaccgagcgggtgcgcgagctgttcgccgccgccggcatcgccattccggggcgcgacgagtggcgcgcgctgcgccagtcggtgatgatgcacgggttgtacaaccagaacctgcaggcggtgccgccgaccggttccatctcgtacatcaacaacgccacctccagcatccacccgatcgtctcgcgcatcgagatccgcaaggaaggcaagatcggccgcgtttactacccggcgccttacatgaccaacgacaacctggcgtattaccaggatgcctacgagattggcccggaaaaaatcatcgatacctatgccgccgcgacgcaacacgtcgatcaggggctgtcgctgacgttattcttccgcgataccgccaccacccgcgacatcaaccgcgcgcagatctacgcctggcgcaaaggcatcaagaccatttactacatccgcctgcgccagatggcgctggaaggcaccgaggtgcagggctgcgtgtcctgctcgctgtgaggcaacttatgacgaccgtaacatcggcgccgctggtgcgcgccatcaactggaacatcatcgaagacgacaaggatctggaggtgtggaaccgcctgacctccaacttctggctgccggagaaggtgccgctgtccaacgatatcccctcctgggccacgctgacgccgaaggagcagcagctgaccattcgggtgttcaccgggctgacgctgctggacaccatccagaacaccgtcggcgcgccggccctgatcgccgatgcgctgacgccgcacgaagaggcggtgtactccaacatcagttttatggaggcggtgcacgcccgctcttacagctcaatcttctccaccctgtgccaaacgccggacgtggatgacgcctatcgctggagcgaggaaaaccgcgcgctgcagaagaaagccggcatcattctggcgcactaccgcagcgacgatccgctgctgaaaaaagtcgccagcgtgttcctcgagtcgttcctgttctattcgggcttttacctgccgatgtactggtccagccgcgccaagctgaccaacaccgccgatctgatccgcctgatcattcgcgacgaagcggtgcacggctactatatcggctataagttccagaaagggctggagaaggtggacgccgcgcggcgccagcaggtgaaaaacttcgccttcgatctgctgcaggatctgtacgacaacgaggtgcgttacaccgaggagctgtacgacggcgtcggctggacggaagacgtgaagaccttcctgcactacaacgccaacaaggcgctgatgaacctcgggtatgaagcgctgttcccaccggcgatggcggaggtcaacccggcgatcctgtcggcgctgtcgccgaacgccgacgaaaaccacgacttcttctccggttcaggttcgtcctacgttatcggcaaggcggtcaacaccgaggatgaggactgggatttctgaggctggctagccgtatcaggaataaaccttcacgggagtgcggcgtgtcgtgctctcgcgactatgtgttttgcttgaattccgcacgcagctcaagccgccgccagatggcgcgtttttccgcgtcgctggcggtcggccaggcggcgatctccgcccgcgtgcgccggcatccgcggcactgctgggtttcgtcgtcgatccggcacaggctgacacagggcgatctgacgccaggatgggattgctgagtgtggcccgccatacgttgcccttgatgtgatatgttccgccacaggatacccgatccggcggcggcgcgtcgccaatcagatgatgccgccgttggcgcgcagggtttggccattgatccagccgccgtcggccccggcgagaaaagccaccgccgcggcgatatcttccggcgtgcccaggcgttccaacggcgccatcttcgccagccgctcgataagctccggggttttgccgtcgaggaacaagccggtggcggtcggccccggcgcgacggcgttcaccgttatattgcggccgcgcagctctttcgccagcacgctggtcagcgcttcgatcgccgccttactggcggcatacatgccgtaacccggctgcagcaaccccaccacgctggaggagaagttgatgatacggccgttgtcgcgcaggcgcttcgccgcctcgcgcatcgcattgaagctgcctttcaggttgatgtcgagcaggcgatccgcgtcttcatccctcatgtccgctatcggcgccagcgcgatcaccccggcgttattgaccagcacgtcgacgccgccaaacgcctgttcggcgctgtcgaacagccgggtgaccgcagccgcatcgctgacgtcggccttgacgctcaaggcgcggccgccgcgctgttctatcttgcgcaccagctcatcggccggtgccggattgcctgaatagttgatgatgacggtaaagccatcggcggccagacgctcggcgatggccgcgccgatgccgcgggatgcgccggtgacgatggcgacggagtgagttttctggttcatcgggagctccttaaagaaaacgacaggcatgacgttaatcatgcactgtttatcacggcgaatcagccccgattctctggcatcataatcccaaattatcgaacaatgccgctgggctctgttcgatggccgcccaacgggcggccatctccgttacagcgcgccgtaattcagcggcacccaggtgtaaccgtcgccctggcggttcaaataccccaaccccgggaacgacaggtgtgcgccccccaccagctcgctctgccgcgcgctatcgccaaatatccgcagccgctgagcgaccgccgccttggcatcgttatcaaagctgatagccaccttcggatgcggcatctgcaccgccgccacgtggatcagatcccccagcagcaacagcttctggccctggctggtcacctgatacacgctatgccccggcgtatggccgtgggcggcaaaggcggcaatgcccggggaaagctcaccgtcgccgctgaacggcttaaagtggccggccgcctgatacggcttgatcactgcctgagccctttcgaagttgctcttattgcccgcgctagcctgtttcagttggtccgcgcttagccagaagtccgcgtcctggctggcggcgcgcaccaccgcattggggaataccgccttgccgtcgtgcgtcaggccgccgaggtggtccgggtgcatgtgggtcaggtagatctcatccacctgctccggctggtagcccgccgcacgcaggttatccaccagcttgcccaggccgtcgcccagcagctggccagcgccgctgtcgatcatcaccagcttgtcgccggtattgatcagataagcattgaccgaggtgaccaccggcaggctttgatgccgctcggccaacccggcggcgatctgctgcggcgtactgttcagcaacagcttgtccgccggcaggcgaataatgccgtcggacaacgcggtcacttcaaagctgcccagcatgatgcggtaaaatcccggcgtcggggttttggcctgcggcgcggcggcgccggcctgtaacgacataacggccagcgccgcgcccaacagacaacgtttccagaacatgatgactccttgcgagaattgaacagcgctaagtattgacgcaaaaagcccgatgcgcctgtttaataaatgcctttgataaatatataaacaatatatttattattaataattttgtttgccgccccacacaaccccaatccatattttctcgttcgccacttggttattttccttactccctaaaccaagagtgaggaaatatcatgaactatcaattcgaaaacctggtctttgaaggcggcggcgtaaaaggcatcgcctatggcggcgcgctggaattgctggaggccaaaggcatcatgccgcagatcaagcaaacctccggtgcctcggcgggcgccatcgccgcactgctggtcggcctgggctgcagctcggcagacgtaaccaaaattctgtcggcgatagattttaaaaaattcctcgattataacggcggctttttcggcacgatccaggacgcctatcgcctgttcaatcaatacggcatcgcgcccggcgattatttctatcaatggtcgcgcgatattatcaaacaatataccggcaacccggatattaccttcgagcagttcgaagcgatgaaaacggcgaaagggttcaagtcgatttactttatcggcgccaacctcaacagcggccaacgcgaggtctattctcaccgcaccacgccgcgcatgaaagtggcggacggcctgcgcatttcgatgtcgttcccgttcgccttcgtagcgaagaacaataccctgggcgacctgtgcatcgacggtggcatgatcgacaactatccggtgcggctattcgattatgacttctccgccacgccgccttacatcgacagcgccagccagcgcatcaacacccgcacgctgggcattcgcctggattccgccagcgaaatcgcccaggccgccggccaggccggcccgcgcacgccggtcaacaacctgtttgatttcaccctggcggtggccaacgtgatgctggacatccaaaccaaggtgcatctggacagcgatgactggaaacgcaccgtgtatgtcgacacgctcgacgtcggcacgctggagttcggcatcagcgaggagaagaaacgcgcgctgatcgaatccggccgtcgcggcgtagagcgctacttcgcctggtatgacgccgccatgaaacaggcggcgtaaccggtgttttcccgcctgcgcgtcaggccggcgcgcgggcaaaaaaaatccccgcgggggcggggaaaggcaaagtaacgctaaggatttataggagttatacgaagaacttggccaacaccagcagcgacagcgagacgttgatagcgccgccgatacgggttgcgatctgggcgaacggcatcagcgacatgcggttgccggcggtgaggatcgcgacgtcgccggtgccgccctgcccgctctggcaacaggagacgatcgccacgtcgatagggtgcatgccgattttcttgccaacgaagaaaccggtcgccaccagcgcgctgacggtcgtgacgatcacgatcagattctggacggtaaacgcgtccaccagctcctgccacggcgtgatggccaccccgaccgcgaacaggatcggataagtcacggcggtgcggaagaatttgtacaccacctgcgaaccttcctgaatgcgcggcgacaccccgtgcgccagcttcaccgctacggcggcgaacagcatgcccaccggcgccggcaggccaattaggcggtgcaacagcatgcccaccatatacagcagaatggccaacagcgcaccgcaggcgatggtgctgacgtccaccttgccactgattttttccaccgcgttcatgttgctgtcgccctgcttactcggcatcaggctgccttcgccggtcaggtgcggataacgcttgcccagttggttgagcaggccggcgatgacgatggcggtcaggctgccgagcatcacgatcggcagaatgcgccccagcgccacgccctgctccatgtgcaggatcgccgcgtagcccatcgacagcgggatcgccccttcacctacgccgccggccatgatcggcaagatcaggaagaagaagatctggaacggctccaggcccagcgccatgccgacgcccatccccaccagcatgccgacgatctcgccgcacagcatcggaatgaagatgcgcaggaaaccctggatcagcacctggcggttcatgctcatgatgctgccgacgatgatgcagcagatgtagagataaagaatgttggtcgatttgtagaacttggtggtcgattccaccaccacgtccggcaacaggccatagtgcaccagcgcggaaggaataaaggtggcgcagatcgccgccgcgcccattttgccgatcaacggcaggcgtttgccgaattcgccgcaggcgaaaccaaagaacgccagggtggccaccatcaccacgatatcgctcggcaatttgccttccaggcagtcgagcagaatcaatacgccggccagaataaagaacggtaacggaataatccctactttataattgtccagtatccgccaccatttctcacgcagaggaatatcggcggtcttgtctttggctacgaggtaagaatcatctgttgtgctcataatctggcctcttattagtttgttcagccatcatagagaagcgcacggattatctgctgtgattatgttcaaagttaaaaagggtttttaatggtggttatggtttctatggggttaattaagattatgtaaaaatcgacgtggttttaatggtgttaataccgtttttattttaaagcttatcaattttatcgcaggcgaacaattctcgtccggttcactctaatcccgtgtgaaggatcacaagttgatcgggcgcaatattacagaccccgcttctcgtgatagggtaaggcttcaggatctctttacggtgaagctccgccatgcgcctcaaactctcatttcaaatcaagctgtttctgtgcctggtggccttctcctgcctgctgctgacctgtatcggcgcctacacctattaccagttggatgcgcagctgcaccgcgatctcggcgcccgcgcccaggtgcaggcgcgggaaatcgccctcattccttcgctggtggaagcagtggaaaaacacgacgccgccagaattgccgcgctgatgaaaaaaatccgcgccagcagcgacgccagttatatcgtcatcggcgatagtcatgcccgccacctttatcattccgaatacgaaggccgcctgggtacgccgatgatcggcggcgataataaagaggtgttggaagggaaaagcattatttccattcgcaagggcggcattggcgtttcattgcgcagcaaggcgccgatcctggatgaaaataatcacgtgatcggcatcgtttccgtcggctatttgaaatcgcatatcgataatttaaatgccaggacgttgacgcaaattatcggctccatcgttctgctgctgatcgccctgttcgtcttttcctggctgctgtcgaaaaacctcaagcgccagatgttctggctggaaccgaaagagatcgcgctgctggtgcgccagcaaaaagcgctgctggaagccatctatgaaggggtgatcgccgtcgatccacagctgcggatcatcaccatcaaccatgcggcgcgcgagctattggatctgcaccagcccgccgccagtttgctgggccggccgatcggcgaggtgatccaggcgcagcctgacttcttcgccgccgcgcaactgggccaggatacgcacgacgaggtgtgccgcttcaaccacgtgcgggtgatcgccagccgggtgcgcatcatgcaagagcaggagctgcaaggctgggtgatcagcttccgcgacaaaaacgacatcaataccctgagcagccagctcagccaggtgaaacgctatgccgacaacctgcgcatcatgcgccacgagcagctgaactggaccgccacgttggccgggctgttgcatatgcagcgctacgacgaggccattcgctatgtggaagcccaatccgagggcgcacaggagatcctcgatttcatctcgcagcgcttcagttcggcggcgctgtgcggcctgctgctgggcaaatattccagcgccagagaaaaaggcatcgagctgcgcttcgatccggcctgccaactgcggcaaatcccggcggcgctgaatgagaccgaactgatgtcgatcgtcggcaacctgctggataatgcggtggaggcgacgctgcactgcccggcgccgcacgacgcgatcgaactctatatcagcgatggcagcgacgagctggtgatcgaggtggcggatcgcggcaccggcatcgccgaggagattcgtgatacgctgtttgaacagggcgtcaccaccaaagcggataaaagcgaccacggcattggcctgcatctggtcgccagccatgtggcgcaggcgcacggcagcatagaagtgtcggacaacgagccgcacggcgcgatattctctatatttatccctaaataaaacccataacccgattttttgagcacccgattatgtcacacctagcactggacgttctgatcgtggaagacgagccgcaactggcgacgctgcacgcggagttcatcgagaaaaatttcaacctgcgggtggtggcttacgccgccacgctggccgaagcgcgggccaaagccaacgagcatcagcctcggctaatcctgctggataacttcctgccggacggccagggcatcgagttgatggaagaaccggcggtgaagaatcccgcctgttcggtgatcttcatcaccgccgccagcgacatgcatacctgcagccaggcgatccgcaacggcgccttcgattacatcatcaaaccggtgtcctacaagcggctgcgcaattcgctcgaacgcttcatgcagttcgtgcagacccagcgcaccttcaagatcatcgatcaggacaacgtcgatgcgctgtataacctgcagtcgaaacagttctccagcgagccgagcgccaaaggcatcgaaaccaacacgctggagctggtgcaggcgctgtttatcgcccagccggcggtggcgcatgcggtggaagacgtggttgagcaagtcggcatcagcaagaccaccgctcgccggtatctggaatattgcgtcgccacccagttcgtgcgggtggagatgctgtacggcaatatcggccatccgcggcggctgtatcgcaaggtctgaggctgccatctggctgtcatactcaggcgataacatgacgctcgacgatatccccctcgatatcggcacctgtcgttaaaactgatgaaatactgatgacttttacccggcctctggtcgggttttttattatccgaacggcaggtgcggcgccaaaatatctctctgcgccacaccgtattattttcccaaaaaccaaaccattatgccgaataatgaccgtcaattttgagtcacgggccaaattaccataactaattaaaaccttgatgtaaaccactaatatcccatttaaatgacattgagggttgtctcagatattcactgtgttagggtaaaaagctcttttattttgctaaggacagcccataacgcgttaattaaaccagaggaaacagcaaattgcatggcaattaaactcgaagtaaaaaacctgtataagatatttggcgaacacccggaacgcgcattcaaactgctggataaaggtctgacaaaagatcggctgtttgaaaaaaccggcttatcgctcggcgtaaaagacgccactctggccattgaagaaggcgagatatttgtcatcatggggctctccggttccggcaagtccaccctggtacgccttctcaatcgtctgatagaacccacccgcggtcaggtgctgatcgacggtgaggacatcgccaaaatatctgacaccgcgctgcgcaccgtgcggcgaaataagatcagcatggtatttcagtcattcgcgctaatgccgcacatgaatgtcctgaataacaccgctttcggtatggaattagccggcataccgctgcaggagcgccaggaaaaagcgctggatgccctgcgtcaggtcgggctggagaattatgcgctgtcttatccggatgaattatccggcggtatgcgccagcgcgtgggattagcccgcgccctggccaataacccggatatattattgatggacgaagccttctcggcgctcgatccgttaattcgtaccgaaatgcaggatgagctggtgaaattacaggctcagcatcagcgcaccatcgtgtttatttcccacgatctggacgaagcgatgcgcattggcgatcgcatcgccatcatgcagggcggtgaggtgatccaggtcggcacgccggacgagatcctgaacaacccggccaacgactatgtgcgcaccttcttccgcggcgtggacatcagtcatgtattcagcgccaaggatatcgcccaacggcgcccggtgacgctgatccgcaaaacccccggttttggcccccgctcggcgctgcagctgctgcgcgatgaggaccgtgattatggttatgttgttgaacgcgggaagaaatttatcggcgtggtgtcgatagagtcgttgaaaaaggcgctgtccgccaatcaaacgctggacgatgccctgctcgaggcccccgccgccgtgccggccgacacgccgctcagcgatctgatttccctggtcgcccaggcgccgtgcgcggtgccggtggtgggcgaagaacataactatctcggcatcatctccaaggccatgctgctgcaggcgttggacaaggagggctcaaccaatgagtgataccacgcaaacccaagatccctgggctaccgcaccggccgataccggcgccgcacctgccagcgatgccgccgccaacgccggtgacgcctggtccagcgcgccgccgccggccgcacatgacgccgccgggcaaagcgccgattggctcagcggcgccccggcgcagccggagcacttcagcctgctcgatccgttccacaaagcctgggtgccgttcgacacctgggtcacgcaaggcatcgactggctggtgctgcacttccgcccgctgttccagggcatccgcgtgccggtggacatgatcctgagcggcttccaacaactgctgctgggcatgccggcgccgatcgccattctggtgttctcgctgctcgcctggcaggtctcgggcctcggcatgggcgccgcgacgctgctctccctgatcgccatcggcgccatcggcgcctggtcgcaggcgatggtcacgctggcgctggtgctgaccgcgctgttcttctgcatccttatcggcctgccgctcggcatctggctggcgcgcagcaagcatgccgccaaggtgattaggccgctgctcgacgccatgcaaaccactccggccttcgtctatctggtgccgatcgtcatgctgttcggcatcggcaacgtgccgggcgtggtggtaaccatcatcttcgcgctgccgccgatcgtgcgtctgaccattctcggcatcaagcaggtgccggaggatctgatcgaggccgccgaatcctttggcgccagcccgcgccagctgctgttcaaagtgcagctgccgctggcgatgccgaccatcatggccggcgttaaccagacgctgatgttagcgctgtcgatggtggtcatcgcctcgatgatcgccgtcggcggcctgggacagatggtgctgcgcggcatcggtcggctggacatgggcctggccgccgtcggcggggtcggcatcgtgatcctggcgatcattctcgatcgcctcacccaatcgctggggcgcgatcgccgcagtaaaggcatcggccgctggtatcgccgcggccccatcgggttactgactcgcccgttcatcaagcaagcctgacgcttttcccgccggcggctgcggccccggcgggctatgacaccaccacatcgaaagaggggaaacactatgcgcaccacgggcatctgggctctcgccctgacgacgctgattggctcacagagcgtgagcgcggcagatttacccggcaaggggatcgcggtacagccggtgcaaagcaccatttccgaagagactttccagacgctgctggtcagcaaggcgctggaaaaattgggttacgacgtgaaagaaccgcgtgaagtggattacaacgtcgcctacacttcgatcgcctccggtgacgcgacctttatcgcggtcaactgggatccgctgcacgccgatcagtacaaggccgccggcggcgacgccaagttctaccgcgaaggcgtctacgtcaacggcgccgcgcagggctacctgatcgacaagaaaaccgccgagcaataccacatcaccaacgtcgagcagctcaaggatcccaagatcgccaagctgttcgacaccaacggcgacggcaaggccgatctgaccggctgcaccccgggctggggctgcgaagcggtgatcaaccaccacatcaaggcctatggcctgagcaacaccgtcgagcacaatcagggcaactacgcggcgatgatcgccgacaccattacccgctacaaagagggtaaaccggtgctgtattacacctggacgccgtactgggtcagcgatgtgatggtgccgggccgcgacgtggtctggctgcaggtgccgttttcctccctgccgggcgagcagaaaaacgttgacaccaaactgcctaacggcgccaactacggcttcccggtcaacaccatgcgcatcgccgccaacaagcagtgggccgcagccaatccggcggccgccaagctgttcgccatcatgaagctgccgatcgccgacatcaacgcgcaaaacctgcgcatgcatgaaggccaggcttcggaagccgatatccagaaccacgttaacggctggatcaaggctcatcaggccaccttcgacggctgggtgaaaaccgccgccgcagcggcgaagccgtaaccgttcaggggcgccgcctttgccgcgcccctaccccgccatatcgatgccgctgaactgtaaaaaacgtgcggcggcgttcgacaagggctgcggccaaatgcaatacacctggcgccgcggcccgtcttcaatcggaatcgacaccaacgcgcttaagcgttgcgcggtcgagacaggtacgatacccgccgccaacccgcgccgcaccagattctccagccattcgatatgatcgatctcaaaactgacgtgccggcggatgcccgccgccaggaaggcgcgatcggtttggcgccgcgcgccggtgccgctgtagaaatccaccagcggcacttccgccagcgcttgcaggttgacccgctcgcggttggccagcgggtgctgcggtgccaccaacgccaccagcggctcatcggtcaactgccggtgcgacatcggcagtaaatcgacatcgccgggccagatgccgacaaacgccatatcacacttctgctgacgcacgtcctccaacagggcttcgctcatgccaacgtaaaggcggatgttcaccgccggatagtggcgatgaaacttgtcgagcttttcggtcagatcaatcgcgtttatggttgaaatcgtgccgatggtcagggtgccggacaccgcatcgccggcggcggtcacctcttccaccagtgcctgctgcgccgccaacagccgctgcgccgacggaatgaaagcctggccggcgggggtcaatcgcacccggcgcgaggtgcgttcaaacagcgtacagcccagctcttcttccagtttggcgatctggtggctgagcgccgactgcaccgtatggcagcgctgcgccgcccgggtgaaactctgttcttccgccaccgccagcgcatagcggatctgtttcaggttcatggcatctatcttgaaatgagataaatcaaatgaaaattatacattggtttccgcagacgcgttgccggatactgcgcgctatcttcttcccgtgatgaaaaaatcatgaccccaaaaaacgcccatccgggcctcagcccggcgctgaccgtgctgatcgccatcgccaccggcctggcggtcgccagcaactattacgcgcaaccgctgctggaaaccatcgccaccagtttcaacctgtcggtcaaccaggccggctttatcgtcaccgccgcgcagctcggttacgccaccggcctgctgctgctggtgccgctcggtgatatgttcgagcgccgcgggctgatcgttttcatgacgctgctggccgccggcggcatgctgatcaccgccacctccgccacgctgccgatgatgatcctcggcaccgcgctcaccgggctgttctcggtagtggcgcagatcctggtgccgctggccgccacgctggcccacccggaaaagcgcggcaagaccgtcggcatcatcatgagcggcctgctgctcggcatcctgctggcacgcaccgtcgcgggcgcactggcgtcgttcggcggctggcgcaccatctactgggccgccagcgtgctgatgatcctgatggcgctgatcctgtggcgcgcgctgccgcgctataagcaacactccgggctgaactacccgcagctgctggcctcgatcttcagcctgttctgccgcacgccgctgctgcgcacccgcgccatcctcggcgccctgtcgttcgccaacttcagcgtgctctggacctcaatggcctttttgctcgccgcgccgccgttcaactattccgagggggtgattgggctgttcggcctagtgggcgccgccggcgcgctggccgcttcgcgcgccgggcatctggcggacaaaggcaaggccgggctgaccaccaccgtcggcctggcgttgctgctgctgtcctggatccctatcgcgttcgccaaacaatcgctgtgggcgctgatcgccggcatcctgatcctcgatctggcggtgcaggcggtacacgtcaccaaccagagcgtgatgtaccgcatcatgccggacgcgcgcaaccgcctgaccgccggctacatgaccagctactttatcggcggcgcgctcggttcgctgctctccgcctcggcctatcaacatgccggttggtacggcgtggccgccgccggcggggtgttatgcctgctcaacctgctgacctggtggctcggcaagcaccacgatccgcagggaccggcagcaatctgattatcgtgcaaatagtcactaaagaaatttattagcagtgcagggtataaacattacttactctctggtaatgttctgggcataaactattgaagtcctatctaccctgcgatccacaaccatgcaaagccaagctgcagacagcctcaatccgcccgccgtcagcgccaccttcgccaacggcgtcgtcgacagtttgccgatcgtcatcgggtatgtcccggtggcgttcgccttcggcctcagcgccgtcaaactgggtttttccccgctggaaagcattttcttctcctgcatcatctacgccggcgccagccagttcgtgatcaccgccctgctgagcgccgggatgtcgctgtgggtctccgcattgacggtgatggcgatggacgtgcgccacctgctgtacggcccggcgctgcgtcaccgcatcgtctcgcgcatgtcgcccggcaaaacggcgatatgggcctttggcctgaccgatgaggtcttcgccgccgccaccgccaggctgatgcgcaataaccgcagctggagcgaaaactggatgctgggcatcgcgctctgttcctggctctcctgggtggccggcaccgcgctcggcgcgctgttcggcaacggcccgctggagcagttcccggtgatcgaggcctcgctggccttcatgctgccggcgctgtttctcagcttcctgttggccgccttccgccgcccgcagagcctgactatcgccgccgcgctggccggcgcgctgctcggcgtggtgctgttctccattccggtcgccattttggccggcatcggcgccggctgcattgccgccctgttccagccagccccggcggaggccagccatgaacactgatgtgctggtgatcggcctggtggtgggctgcgccaattacctgttccgttatctgccgctgcggctggcgccggcgcgcgcccagcccggcctcaaacgcggtaaagccgccctgttgctcgacagcattggcatcgcctcgatctgcgccctgttggtggtctccagcacgccggtggtgatgcgcgaaccggacaaactgctgccgacgttggtggggttcgccgcgctggcactgtgcttctaccgcagcaaaagcatcattctgtcgacgctgctcggcgcaacggcctttggcgtcacattaaaactgttaatgcttttcggtgcaggctgacgccgctcccgatcgtttggcttcacattggcgttttcaggcgccacatctttacaaacactgacaaatgacacgaattgctaaattatccgcacggctgaacatttacattatttgtcaccgtcgttactatctcgaacgaaattaatgaggccctaaattatggaaagctcgtttgcccccatagaacaaatgctgaatttccgcgccacgcggcagaaagatttcccttatcaggaaatcctgctgacccgcctgtgcatgcacatgcaaggcaagctgctggaaaaccgcaataagatgctgaaagcgcaggggattaacgaaacactgtttatggcgctgattaccctggatgcgcaggaaagccacagcatccaaccttctgagctaagctctgccctgggctcctcgcgcaccaatgcaacccgcatcgccgacgagctggagaagcgcggctggatcgaacgccgggaaagcgacaacgatcgccgctgcctgcatctgcatctgacgccgcagggggaagaatttctcagtcaactgctgccgccgcagcaccaatgtctgcatttcctgtggtccacgctgaccgacgatgagcaaaaacagctggaacagctgacgcgcaaattgctggcacgtctggatcaaatggaaatcacagaacagttaccctaattcacaatttctgttcaggtacctacttatgcgatccccatttcactggagattcaccccgctgttcgccgtgttgctgctggccgggtgtgcttcgaccgataatattgccccgcaatccacgctgatggatccgcagagcctgcagttggctcagccgaaagtcagttcgctggccgtcagcccgcagtggtggcgcgccctcaaggatccgcagctggacgccctgatgacgcagacgctgcaaagttcgccgaccctgcgtcaggccgccgcccgcgtgcgcgaagcgcagagcgtggtgggcgaagccagcgccgccaacgggccgaacctggatctgaacgccagcacccagcgccagcgtgtgccgcagaacgtcaatatggggctggggtatccgcataagccgatctattcaagctccaactcgctggggttgaacctggcgtacgagttcgactggtggggcaaataccgcaaccaggtgaacgccgccaaggcgcaagtgaacgcagcgcgcgccgagcaggaacaggcggcgttgacgctgaccagctcggtggcgtccgcctactaccagctgcagagcaatctggcgctcgagaagctgctgcagcaggaagtgaacaacaacgagcgcctgaccgcgctgcgccaacagcgctatcaggccggcctgaccggcgtcgatgtgccgcaacaaacccaggcgcagtccgacgtcgccaagcagcagatcttgcagctgcagtcgcaaatcgaacagctcagacaccagctcgccgcgctggcgggccaggggccgaacgccatgcagcacctgcgtcaggtgccgctgcctgcagacaacctgatggcgccgcagggcgaactgacggcggatctgctgggcaaacgtccggacatcgccgcgcaacgccagctggtggagtcttacagccagcgcgtcagcgccgcgcgtaaagagttttaccccagcctgaccatttcagccttcgccggcctgatgaccaccaataccagtggcaccagcccgaatctgtttgaagcggccagccaggcctggaacgtgatgccggcgatctcgctgccgatcttccacgccggggccctgcgcagcaagctgggcgaggaatccgcgctgtatgacgaagcggtggaatcctacaaccaaaccatcctgaatgcggtacaggaaaccgccgacgccatcaccatccagcagagttctgcgcagcagcaactgcaggcggcgtccgcggcccagtcgatgcaacaggtgtatcaggtcgccaacgcccgttaccaggcagggattatcgggcgcgacgatctgttgaccagccagacgcagctattgcagcagcaacaggcggagttgaatgccagcagcaatttactgcaggcgaagataggactgatccgcgcgttgggcggtggctatcaggccccggccgcagcggattcgaaagcataataatataaggcttggagaacaccatgagcgcaagcgcggaaacccaaaacccgcagcagccgagcggcaaaaagaagcagcgcaaattttggctgctgttgctgacggttattttcattgttataggggtggcttatttagtgtattggttcctggtgctgcgtcatcaccaggaaaccgacgacgcctacgtctccggcaaccaggtgcagatcatggcccaggtgtccggcagcgtgaacagcgtcaacttcgacaacaccgactacgtcaagcagggcgacgtgctgctgacgctcgatccgaccgatgccgagcaggcgtttgaacgcgccaaaaccggcctggccaacagcgtgcgtcagacccaccagctgatcatcaacagcaagcagtatcaggccaacatcgccctgcgcaagaccgatctgagcaaggccgagaacgatctgaaacgccgcgtggtgctgggcagcgttgacgccatcggccgcgaagagctgcaacacgctcgcgatgcggtcgacagcgccaaagccgcgctggaagtggcggtacagcaatacaacgccaaccaggcgatggtgctgaacaccccgctggaacagcagccggcgatccaacaggccgccgcgcagatgcgcgacgcctggctggcgctgcagcgtaccaaagtgatcagcccgattaccggctatgtctcgcgccgcagcgtgcaggtcggcgcgcagatcgccgccggttcgccgctgatggcggtagtgccggccgatcacatctgggttgacgccaacttcaaggaaacgcagatcgccaatatgcgcatcggccagccggcgacggtggtcagcgacgtctacggcgacgacgtggtgtatcagggcaaagtggccggtatcgacatgggcaccggcagcgccttctcgctgctgccggcgcaaaacgccaccggcaactggatcaaggtggtgcaacgcctgccggtgcgtattgagctcgacgccaagcaggtggccgatcatccgctgcgcatcggtctttcgacgctggtgaccgtcgacaccgccaatctggacggccgcgtgctggccgacgtggtgcgcgacaaaccgctgtatcagagcgacgcgctggcgttgaatctggcgccggttaaccagctgatcgccgacgtgatccatgcgaacgccggctaagcgcgcgggaggccatcttgccacagaaaccgcttgaaggtgcccagcttgcctggatgacggtcgcgctcgccatggcgaccttcatgcaggtgctggactccaccatcgccaacgtggcgatccccaccatttccggtaacctcgggtcttccaactcgcaaggcacctgggtgatcacctcgttcggcgtggcgaacgccatctcgattccgatcaccggctggctggcgaagcgtttcggcgaagtgcggctgttcctttggtccaccgcgctgttcgccatcgcctcctggctgtgcggcatctccaacagccttggcatgctgatcttcttccgcgtgatccagggcgtggtggccgggccactgatcccgctgtcgcagagtttgttgttgaacaactacccgcccgccaagcgagcgatggccctggcgctgtggtcgatgaccgttatcgtcgcgccaatcttcgggccgatcctcggcggctacatcagcgacaactaccattggggctggatcttcttcatcaacatcccgatcggcgtcttcgtgatcgtggcggcgatggcgacgttgaaggggcgggaaaccaaaaccgagatcaaaccgatcgacaccgtcggcctggtattgctgatcgtcggcatcggttctctgcagatcatgctcgatcagggcaaggagctggactggttcaactcgaccgagatcatcacgctcaccgtcgtggcggtggtggcgctgctgttcctggtggtgtgggagctgacggacgaccatccggtggtggatctgtcgctgttcaagtcgcgcaacttcaccatcggctgcctgtgcatcagtctggcgtacatgctgtacttcggcgccatcgtgctgctgccgcagctgttgcaagaggtgtacggctataccgccacctgggcggggctggcgtcggcgccggtcgggctgatcccagtgttgctgtcgccgatcatcggcaagttcggcaaccggctcgacatgcgccggctggtgaccttcagcttcatcatgtatgccgtgtgcttctactggcgcgcctatacgtttgaaccgggcatggacttcggcgcatccgcctggccacagttcgttcagggcttcgccatcgcctgcttcttcatgccgttgaccaccatcacgctgtccggcctaccgccggaacgcatggcggcggcatcgagcctgtcgaacttcacgcgaacgctggcgggctcgatcggtacctcgatcaccaccaccctgtggacgcagcgcgaatcgcagcaccattcgcaactgacggagttcgtcaacccgtacaacccgcagtcgcaggagatgtaccggcaactggagcagctcggcatgagcaagcagcaggcgtcggcgtatatcgccaacgagatcaccgcgcagggcctgatcatctccgccaacgagatattctggctgtcggccggggtgttcctggtgttgctggtgctggtgtgggtggcgaaaccgccattcagctccggcggcggcgggggcggcggcgctcactaagcttcaataaacgaaacgggcgccctggggcgcccgtttttttatccgacgtagaaaattacgcctgattctgacgccaccagtccgccagcagaatgccggtcgccacggaaacgttcaggctttccaccttgccggtgccgccgatggacacgttcatatcgccctgctgccaggcgctgtcgctcagaccgtcgcgttcctggcccagcaccagcaccatcttggccggcagcttggcctgcgccagcgcggtgcctttgtggctggaggtggtgacgatggtgtaacccgccttgcggaaggtatccagcaccgacaggaaatcatcggcgttgatcgccttgatgtgctccgcgccgccttctgcggtgcgcaccgccgcgccggattccagcagcgccggatcctgcagcagcacgccgttgacgccgaagtgggcgcaagaacgaacgatggcgcccaggttatgcgggttgcccacttcttccagcgccaatacgcagtcggtcgccggcgcgcttttcaggtaggtctgcgcatccaggccctgacgctttttgatcaggaagcaaacgccgccgtggtgctcggtgccggaagccttggccagttcttcttcatccaccacgtggtaagctttgcggttagccgccatccagcgcagcgcttcgcggaagcgcggggtgaccgactgcacgaaccaggcgcgcacgatcgcttccggacggctggcgaacagcgcctgacaggcgttttcaccgtaaacgcgggtttcttccgcgcgctggcggcgcagctgctcaggatcgataaagcttttgccgctgatgccgccatgatcgaacgccggctcttcattcggcgcacgcgagacggttctccacggcgactcattgccaccgcgatcttcagagcgcgccggacggcgaggacgatcgctttcactgcggcgggagtcggcgccgcggcgatcgttgccgccgcgcgccttgtcttgaccggtgcggcccgatcgcgcaccgtcagccggacggcctttgccggccggacgtttattcttgttacggtcgtcgccgttgtcgtcgtcactgcggacgtacatcactttgactttaccgttcttgccactaaatgaatcgttcattgtcttctccaccaacgcgcagggcgcgaagattacctgatgttggtgcacgaagccaccaacttgcgctaaaagctcccaactatcacatccattgaacaaacctcattgttcacgcgccgggttttgccgataattgtcagcattaaagaaacatctccgcaaccgcgttgcggggaccatgctttctctgtacccgaggtcaacatgaatacagtttgtgcagcttgcaatgccaccaaccgcgtgccggaagaacgtctggcggacaatgcgaaatgcggccgctgcggccatgagctcttcgacggtgaagtgatcaacgccaccgccgccacgctggaccagttgctgcaggacgatctgccggtcgtggtcgatttctgggcgccgtggtgcggcccgtgccgcagctttgcgccgatctttgaagacgtggccgaagagcgcgccggcaaagtgcgcttcgtgaaagtgaacaccgaagccgagccggagctgagcgcccgtttccgcatccgcagcatcccgaccatcatggtgttccgtcagggcaagatggtcgacatgctcaacggcgcgatgccgaaagcgccgtttgacaactggctcaacgagttagtgtgattcggcaagtataggccgtatcccgccattgcgcgcgaacgcccccgatcgagcccgcccctcccggcgggcttttttctgcgttacaatagcggtttttccccaggatcgttatgaccgacaacgccgtacttcgcctgcgccaattccgtttagaccgcgccacccgcccttttttggcgcgcggttgccgggtggcgcgttgtcagggttgcctgctgccgcataaaaactgcctgtgcgacaccattcgcccacagcaggccggcagccgtttctgcctgatcatgttcggcgccgagccgctcaagcccagcaacaccggccgcctgatcgccgatatcctgccggacacccaggcgttcctctggtcgcgcaccgaggtcgatcccgccctgctggcggccatcaacgatccgacacggcagccttatgtggtgttccccgcgtcctacgccgacgccgaacggccggtgttcagcgcactgcccgtcggcggcaaaccgccgctgttcatcatgctggacggtacctgggcggaggcgcgcaaaatgttccgtaaaagcccgtatctcaatcaattcccggtgttttccctcaacgtcgacgccgcatcggactaccaactgcgcgaagccagccgcgccgagcaacactgcacggcggaagtggccgccgccctgctgcaacaggcgggcgatctgccggccgccgaagggttgaatcagcattttcgctatttccgtcaacagtatctggcgggaaaaccgacccggccggaggcatcggtcacagcaatgcagccataaagcgcctaaaatcaggcataacgttgccaaaaggagccgtgcatgagccagcgagggttagaagcgctactacgtcccaaatcgatcgccgtgctgggcgcttcgcagcagccgggccgcgccggcaacctgatgatgagcaacctgctggccggcggtttcggcggccccatcctgccggtgacgccgcgctacaaggcggtatgcggcgtcatggcctatcccgacgtcgccagcctgccgctgacgccggatctggcgatcatctgcacccacgccaagcgtaatctggcgctgctcgacgcgctggggcagcgcggctgtaaaaccgccatcgtgctctcttcgccaccggaacagttcgccgagctgaaagcctgcgcgcagcgctacgccatgcggctgctgggccccaacagtctgggactgctggcgccgtggcagggcattaacgccagcttctcgccggtgccgatccaaaaaggcaagctggcgtttatctcgcagtccgccgccgtcgccaacaccattctcgactgggcgcagcagcgcgaagtcggcttctcctatttcatcgcgctgggcgacagcctggatatcgacgtcgacgatctactcgactttttggcgcgcgacggcaagaccagcgccatcctgctgtatctggaaaacatcagcgacgcacggcgctttctctctgcctcgcgcagcgcctcacgcaataagcccattctggtgatcaaaagcggccgcagccaacaggcgcaattactgctcaacagccagcaagggctggacgccgcttacgacgccgccatccagcgcgccggcctgctgcgcgtgcaggatacccatgagctgttctcagcggtggaaaccctcagccatatgcatccgctgcgcggcgaacggctgatgatcgtcagcaacggggcggcgcctgcggcgatggcgctggacgagctgctcgggcgcaacggcaagctggcgacgctgagcgaggagagcctggcgaagctgagcgatgcgctgccggatttcattcgcgccggcaacccgctcgatctgcgcgacgacgccacgccgcagcgctacctggcggctcttgaagcgctgctcgacagccacgactatgacgcgctgctgctgatccatgcgccgagcgcggcggcgccgggcaccgccacggcgcagcggctgatcgacgcgctgcaccgccatgcgcgcggcaaacgcatcaccttgctgaccaactggtgcggcgaatactcttctcaagaggcgcgccggctgtttaccgaggccgccattcccacctaccgcacgccggaaggcgctgtgaccgcttttatgcatatggtggaataccgccgcaaccaaaagcagctgaaagagacgccggcgctgccggtcggcctgaccgccaataccgccgacgcccaccgcctgatccatcaggcgctggccgaaggcgccacccagttggatacccacgaggtgcaatccattctgcaggcctacgatctgagcaccctgccgacctggatcgccgaagacagcgccgaagcggtacatatcgccgagcagatcggctacccggtggcgctgaagctgcgctcgccggatatcccgcacaagtcggaagttcagggcgtcatgctctacctgcgcaccgcgaccgaagtgcagcgcgcggcggaggcgatcctcgaccgcgtgaagcgcacctaccctcaggcgcgcatccacggcttgctggtgcagagcatggccaaccgcgccggcgcccaggagctgcgcatcgcggtagagcaggatgcgattttcggcccgctgatcatgctgggcgaaggcggtgtggaatggcgccaggaaaatcaggtggcggtcgcgctgccgccgctgaatatggcgctggcgcgttatctggtgctgcaggcggtgaaaggcggcaagatccgcgggcgcagcgcgctgcggcctttagatatccccgggctaagccgcttgctggtgcaggtctccaacctgatcctcgactgcccggagatcgcccggctggatattcacccggtgctggcttccggcagcgaattcaccctgctggacgtgtcgatgcagctcgcgccgttcagcggcgatccgcaggcgcggctggcgattcggccttatccgcatgagctggaagagaccatcgcgctgaaagacggcagccaatgcctgttccgccctatcctgccggaagacgagccggcgctgaagcatttcatcgaccgggtgaccaaggaagatctctattatcgctacttcagcgagatcaatgagtttacccatgacgatttggccaacatgacgcagatcgactacgatcgagaaatggcctttgtggcggtgcgcgcagaagagatcatcggcgtgacccgcgcgctgtccgatccggacaacaccgacgccgaattcgccgtgctggtgcgttccgacctgaaaggcctgggcctggggcgtcaattgctggagaaaatgatcgcctatgcgcgcgcgcatggcctgacccgtctgagcggcatcaccatgccgaataaccgcggcatgatcgcactggctcagcggctgggctttggcatcgaggtgcagcttgaggacggcatcgtcaatctgacgctgccgctgcgggccgccgacgcgcagtgacctgcgtcgcaatgcgctacgaatccaccacttaacgccaaaacatacgcacaatcggggcaactaatggtattatcgcccgattattcggtttattgtttttatgcctgtggcgttctggccatcaatcatgagagaagaaacgcactgtgatgttgtcaaaatttaaacgtagcaaacatcaacaacaccttgcacaactgcccaaactcccccagacggttgctgatgttcgtacgttgtacgcgccgtccgattttcgcaccacgctgctggacgccatcgccaacgccacccaacgcatctatctggtggccctgtatctggagcatgacgacgccgggcgcgagatcctcaatgcgttgtatcaagccaaacagcggcggcccgagctggaaatctgcgtactggtcgactggcaccgcgcacagcgtgggcgcatcggcgccgccgccgccaataccaacgccgactggtactgcgccatggccagccaacatccggaacagtcggtaccgatctacggcgtgccggtcaatacccgcgaagcgctgggcgtattgcatctgaagggctttgtggtcgacgataccgcgatctacagcggcgccagcattaacgacgtttatctgcatcagcatgagaaataccgttacgatcgctaccagctgatcaccaacggcgtgctggccgataccctgatcgattacatcaagcagcatctgctcactgccggcgccgtacaacgcctggatcgcagcgatcggccgaaaagcccggagatcaaaaacgagacccgtctgttccgtttcgccctgcgccgcgccggttatcacttccgcggcaaagccggcaacgatgagctggcggtgacgccgatggttgggctaggcaaacaaagcgtgctgaataaaaccattcatcacttgatgtcgtgcgccgaccagaaactgacgctctgtaccccctacttcaacctgccggcgctgctggtgcgcaacatcatttatctgctgcgacagggtaagcaggtggaaatcatcgtcggcgataaaaccgccaacgacttctatattcctgaagaccagccgttcaaaatcatcggcgcgctgccctacctgtatgagatcaacctgcgccgcttcctgagccgcttgcagcgttacatcgacaccggccaactgatcgtgcggctgtggaaggatggcgataacagctatcacctgaaaggcatgtgggtagacgaagagtggcagctgattaccggcaataacctcaacccgcgcgcctggcggctggatctggaaaacgccattctgatccacgatcccaagcaagagctgcgcgagcaacggcagaaagagctggaatgcatccgaactcataccactgtagtcggccattatcaggaactgcaaagcattcagcagtatccgatcaaggtgcgtaagctgattcgccgtctgcgccgcatccgcatcgatcggctgatcagccgtatcctgtaagcggtatgctgaccccggccaaggccggggtttttattacagctgtatctccttgcctttgcgatgcagtcggagtgaaaccagcaacgccagcaggcacatgccggagacataccagaagaaagcgttctccacgccaaacgatttaagcgacagcgcgacatattccgccgagccgccgaacatggcgttcgccaccgcataagacaagcccacccctaacgcgcgcacctccggcgggaacatttcggctttaagcagcccgctgatcgcggtgtaaaaactgatgatgaacagcgccagcacgatcaggccaaacgccatataaggattactcacctctttcagagcgaacaggatcggcaccgtcaacaccgtggcgaaggctgagaagatcagcatcgagctgcgacggccgattttgtccgaaaacgcgcctaccgctggctgcagcagcataaagacgaacagcgcgacggtcatgatggcgctggccagcttggcgtccataccggcggtgttcaccaggtatttctgcatgtaggtggtgaaggtgtaaaaggtcagtgaaccggcggcggtaaagcccagcaccatcaggaacgccttgcgatttttccacagccccgtcagcgaaccggcatcctcgtggttacgcgtcttcgcatcggaggtttcattcagcgaacggcgcaggtacagcgcgactatcgccaacacggcccccagggcaaacggaatgcgccatccccaggctttcagctcttcagcgggcaatatctgctgcaggatcaccaggaccagcagcgccaacagttgcccgccgatcagcgtgacatactgaaacgaggcgtagaagccacgccgccccttgatcgccacctcgctcatgtaggtggcgctggtgccatactcgccgcccaccgacaacccctggaacagacgggcgatcagcagcaacgctggcgcccagctgccgatcgattcatacgtcggcaggcaggcgatcaccagcgatccggcgcacatcatgcagactgaaagcagcatggagttttttctgccatgcttgtcggcaatatagccgaacagccagccgccgatcggccgcataaagaagccggcggcgaataccccggcggtttgcaacagctgcgtggtgctgttgcccgctggaaagaacgaggcggcaaagtaaatggaacagaaggaataaacgtaaaaatcaaaccactccaccagattgcctgatgaagctccgacgatagcgaaaatgcgtttcttgttatccagcgccccctgttcgacgccgtgctcatccccaagagccgaggttgtttctgtcatgatattttctccgagccatagcaatgatgaaattcggcttcctgccgccctggttgttactttattgttatttataagttaacagccaaacttaatagcggacgaagaatatctgacattcagagaaacaatgcgttggttttgtgatgaatattaaacagtacgatgaaagctgaagcggattacaacggggattttccatttttcccatagcaaaaagccctgaacgtcagttcagggctttcggctttatttgatgcctggcagtgtcctactctcgcatggggagaccccacactaccatcggcgctacggcgtttcacttctgagttcggtatggggtcaggtgggaccaccgcgctattgccgccaggcaaattcgtttcattccaaccgcttcatcgctgaagcctgtcaatccaatctgtaaacaagctgaatattgtcttggtctcaccaaaacaccttcggtgttgtaaggttaagcctcacggatcattagtactggttagctcaatgcatcgctgcacttacacacccagcctatcaacgtcttagtcttaaacgttccttcaggggccttaaaggcccagggaagactcatcttgaggcaagtttcgcgcttagatgctttcagcgcttatcttttccgcacttagctaccgggcaatgccattggcatgacaacccgaacaccagcggtgcgttcactccggtcctctcgtactaggagcaacccctctcaatcttccaacgcccacggcagatagggaccgaactgtctcacgacgttctaaacccagctcgcgtaccactttaaatggcgaacagccatacccttgggacctacttcagccccaggatgtgatgagccgacatcgaggtgccaaacaccgccgtcgatatgaactcttgggcggtatcagcctgttatccccggagtaccttttatccgttgagcgatggcccttccattcagaaccaccggatcactaagacctactttcgtacctgctcgagccgtcactctcgcagtcaagctagcttatgcctttgcactaacctcacgatgtccgaccgtgattagctaaccttcgtgctcctccgttactctttgggaggagaccgccccagtcaaactacccaccagacactgtcctcaccccggatcacggggccgagttagaacatcaaacattaaagggtggtatttcaaggatggctccacgcagactggcgtccacgcttcaaagcctcccacctatcctacacatcaaggctcaatgttcagtgtcaagctatagtaaaggttcacggggtctttccgtcttgccgcgggtacactgcatcttcacagcgagttcaatttcactgagtctcgggtggagacagcctggccatcattacgccattcgtgcaggtcggaacttacccgacaaggaatttcgctaccttaggaccgttatagttacggccgccgtttactggggcttcgatcaagagcttcgccttgcggctgaccccatcaattaaccttccagcaccgggcaggcgtcacaccgtatacgtccactttcgtgtttgcacagtgctgtgtttttattaaacagttgcagccagctggtatcttcgactggcttcagctccatccgcgagggacttcacctacatgccagcgtgccttctcccgaagttacggcaccattttgcctagttccttcacccgagttctctcaagcgccttggtattctctacctgaccacctgtgtcggtttggggtacgatttaatgttacctggagcttagaggattttcctggaagcagggcatcaactacttctgcaccgtagtgcatcgtcatcacgcctcagggttaatatgcaaccggatttaccaggtcacaccccctacacgcttaaaccgggacaaccgtcgcccggccagcctagccttctccgtccccccttcgcagtaacaccaagtacaggaatattaacctgtttcccatcgactacgcttttcagcctcgccttaggggtcgactcaccctgccccgattaacgttggacaggaacccttggtcttccggcgagcgggcttttcacccgctttatcgttacttatgtcagcattcgcacttctgatacctccagcaaccctcacaggccaccttcaacggcttacagaacgctcccctacccaacaacgcctaagcgtcgctgccgcagcttcggtgcatggtttagccccgttacatcttccgcgcaggccgactcgaccagtgagctattacgctttctttaaatgatggctgcttctaagccaacatcctggctgtctatgccttcccacatcgtttcccacttaaccatgactttgggaccttagctggcggtctgggttgtttccctcttcacgacggacgttagcacccgccgtgtgtctcccgtgataacattcttcggtattcggagtttgcatcggtttggtaagccgggatggccccctagccgaaacagtgctctacccccgaagatgagttcacgaggcgctacctaaatagctttcggggagaaccagctatctcccggtttgattggcctttcacccccagccacaagtcatccgctaatttttcaacattagtcggttcggtcctccagttagtgttacccaaccttcaacctgcccatggctagatcaccgggtttcgggtctataccttgcaactaatcgcccagttaagactcggtttccctacggctcccctatacggttaaccttgctacaaaatataagtcgctgacccattatacaaaaggtacgcagtcacaccacgaaggtgctcccactgcttgtacgtacacggtttcaggttctatttcactcccctcgccggggttcttttcgcctttccctcacggtactggttcactatcggtcagtcaggagtatttagccttggaggatggtccccccatattcagacaggatgtcacgtgtcccgccctactcatcgaactcacgacctgtgcattttagtgtacggggctatcaccctttactgcgcgactttccagacgcttccactaacacacaagccgattcaggttctgggctcctccccgttcgctcgccgctactgggggaatctcggttgatttcttttcctcggggtacttagatgtttcagttcccccggttcgcctcatgccactatgtattcatgacatgataatgtgtcgaaacacactgggtttccccattcgggtatcgccggttataacggttcatatcaccttaccgacgcttttcgcagattagcacgcccttcatcgcctctgactgcctaggcatccaccgtgtacgcttagtcacttaacctcacaacccgaagatgtttccatcgttcgcgctgcaaacatttgagagactctatgacaggttactctttatcccaatacttctacggagggacaaatttcagccgtcatgtttcaattttcagcttgttccagattgttaaagagcaaaatacttcgcagcatactgtcgccaatatactctgaagtattgaaataccggactatatggtggagctaagcgggatcgaaccgctgacctcctgcgtgcaaggcaggcgctctcccagctgagctatagccccatacagtcacgcgcagtaccttttccacttcataagaagtggtaggcctgagtggacttgaaccaccgacctcacccttatcaggggtgcgctctaaccacctgagctacaagcctataaaggtatttctgctcgttactttctatcagacaatctgtgtgagcacgccacgcgaactaatatctttaggtaaggaggtgatccaaccgcaggttcccctacggttaccttgttacgacttcaccccagtcatgaatcacaaagtggtaagcgccctcccgaaggttaagctacctacttcttttgcaacccactcccatggtgtgacgggcggtgtgtacaaggcccgggaacgtattcaccgtagcattctgatctacgattactagcgattccgacttcatggagtcgagttgcagactccaatccggactacgacgtactttatgaggtccgcttgctctcgcgaggtcgcttctctttgtatacgccattgtagcacgtgtgtagccctactcgtaagggccatgatgacttgacgtcatccccaccttcctccagtttatcactggcagtctcctttgagttcccggccgaaccgctggcaacaaaggataagggttgcgctcgttgcgggacttaacccaacatttcacaacacgagctgacgacagccatgcagcacctgtctcagagttcccgaaggcaccaaagcatctctgctaagttctctggatgtcaagagtaggtaaggttcttcgcgttgcatcgaattaaaccacatgctccaccgcttgtgcgggcccccgtcaattcatttgagttttaaccttgcggccgtactccccaggcggtcgatttaacgcgttagctccggaagccacgcctcaagggcacaacctccaaatcgacatcgtttacagcgtggactaccagggtatctaatcctgtttgctccccacgctttcgcacctgagcgtcagtcttcgtccagggggccgccttcgccaccggtattcctccagatctctacgcatttcaccgctacacctggaattctacccccctctacgagactctagcttgccagtttcaaatgcagttcccaggttgagcccggggatttcacatctgacttaacaaaccgcctgcgtgcgctttacgcccagtaattccgattaacgcttgcaccctccgtattaccgcggctgctggcacggagttagccggtgcttcttctgcgagtaacgtcaattgatgaacgtattaagttcaccaccttcctcctcgctgaaagtgctttacaacccgaaggccttcttcacacacgcggcatggctgcatcaggcttgcgcccattgtgcaatattccccactgctgcctcccgtaggagtctggaccgtgtctcagttccagtgtggctggtcatcctctcagaccagctagggatcgtcgcctaggtgagccattaccccacctactagctaatcccatctgggcacatctgatggcaagaggcccgaaggtccccctctttggtcttgcgacgttatgcggtattagctaccgtttccagtagttatccccctccatcaggcagtttcccagacattactcacccgtccgccgctcgtcacccagggagcaagctcccctgtgctaccgctcgacttgcatgtgttaagcctgccgccagcgttcaatctgagccatgatcaaactcttcaattaaaagcttgatttgcttccactcgagaagcgatgctcaaagatttactgcatgaattttacttcagttagtcactcttcaagacttgatattttttgcatccgaagatgctggatatcgtcttgtggagtgcccacacagattgtctgataaattgttaaagagcagtgagttaggcgctttcgcttgctaactcgaggtggcgtatattacgctttcctctttcagagtcaaccctaattttcaggattttttctctttcttcccggccgctgtgtgaagtgaatcacttgcgccgtgtcgatggaggcgcattatagggagccggttcagaatgacaagcgataatatgcattttttatctgaccgctcactattcatgcgtaacgcctattaaacccgctttttgatggctgccggcaggtccgccaggctatttagcacccaatcggccagcttttcaccctgctccgtcaccggcttgccggtacgcaccagcaccttggtgccgacgccggccgcgatcgccgcctgcatatcttccggtttatcgcccaccatataagaagcggccatatcgatgttcaattcctgctgcgcttgcagcagcatgcccggctgcggtttacggcagtcacagacctgacgatactcttccactaccgcctccggatgatgcgggcagaaatagatgccgtcgaagtcgacgtcgcgatcggccagcgaccagtccatccactcggtcaggtacataaactggtcttcgctgaacttgccgcgcgcaatgcccgactggttggtcaccatcaccagcgcgaaccccatctttttgagttcgcgacaggcgtcaatcacgccgtcgataaagtggaagttgtcgatttcatggacataaccatggtcaacattaatcgtaccgtcacgatcgagaaaaattgctggaacgctttgtgtcaccgctttgctcctgaggggctgaatacgctgacagtatcgcatgttttaccccgcactgagaacgccggagaacgtcgctggtcgttgacttagacgtctagacgccttaacatctgatccataccttggttccacgccgaggtttacttttatctagccacgggcaaccacgctaaaataagaagaatatgattaaactttctaacatcactaaagtgttccagcagggttcgcgcaccattaccgcgctctctgacgtgacccttcacgtccctgccgggcaaatctatggcgttatcggctcttccggcgccggcaaaagcacgctgatccgctgcgccaacatgcttgagcgccctacctccggccaggtgctggtcgatggccaggatctgacgtctctgtcggaaagcgaactgacgcgcgcccgtcgccaaatcggcatgatcttccagcacttcaacctgctctcttcccgcacggtgttcggcaatgtggcgctgccgctggagctggacaatacgccgcgcgccgagatcaaaaagcgcgtgaccgaactgctggagctggtcggcctggcggacaaacacgacgcctatccggccaatctgtccggcggccagaaacagcgcgtggcgatcgcccgtgcgctggccagcaatcccaaagtgctgctgtgcgacgaagccaccagcgcgttggatccggccaccacccgttccatcctggagctgctgaaagacatcaaccgccgtctgggcctgaccattctgctgatcacccacgaaatggacgtggtgaaacgcatctgcgaccaggtcgcggtcatcagccaggggcagctgatcgaaaaagacagcgtcagcgaagtgttctcacacccgaaaaccccgctggcccagcagttcattcagtccacgctgcatctggatatcccggacgactacgccgcgcgcctgtcgccggagcgtcagggcgaccgccagccgctgctgcgcctggagttcaccggtcagtcggtcgatgcgccgctgctgtctgaagccgctcgccgcttcaacgtgaacaacaacattatcagcgcccagatggattatgccggcggcgtgaaattcggcgtgatgctggcggagctgcacggcagcgacgaagacgcgctggcgacgattaagttcctgcaagaaaatcaggtaaaagtagaggttctgggttatgtctgaggcaatgatgtggttgatggcgcgtggcgtgtgggaaaccgtcatgatgacctttgtctccggcttcttcggtttcgtgctcggcctgccggtaggcgtgctgctgtatgtcacccgcccggggcagatcatcgccaacaattcgctgtataagatcctgtccgggctggtgaacatcttccgttccattccgttcattatcctgctggtttggatgattccgtttacccgcatgatcgtcggcacctcgatcggcctgcaggcggccatcgtgccgttgaccgtgggcgccgcaccgttcatcgcgcgcatggtggaaaacgccctgctggaaatcccgtccggcctggtggaagccgcgcgcgccatgggcgccacgccgatgcagatcatcaagaaagtgttgctgccggaagccctgccgggcttggtcaacgccgcaaccatcaccctgatcaccctggtgggttactccgccatgggcggcgcggtcggcgccggcggcctgggccaaatcggttaccaatacggttatatcggttataacgccacagtgatgaataccgtattagtattactggtagttttggtttatctgatccaattctgcggcgatcgcatcgtcaaagccgttacccataaataatttcaccgcatattaatgcgagtctaatgaggaagggatatgtcgttaaaatttaaatccatcgcggcaattggcgcactgatcggcacgctggctctggcgggctgtggccaggatgaaaagaatccgaaccacatcaaggtcggcgtgatcgtcggcgctgagcagcaagtggctgaagtggcgcagaaagtggcgaaagagaaatacggtctggacgttgaactggtcaccttcaacgactacgtgctgcctaacgaagcgctgagcaaaggcgatatcgatctgaacgccttccagcacaagccttatctggatcagcagatcaaagaccgcggttacaagctggtgccggtcggcaacacctttgtttacccgatcgccggttactccaagaaaatcaaatcgctggacgagctgaaagaaggttcgcagatcgcgctgcctaacgatccgaccaacctgggccgttcgctgctgctgctgcagaaagtcggtctgatcaagctgaaagacggcgttggcctgctgccgaccgtgctggacgtgaccgagaacccgaaaaacctgaagttggttgagctggaagcgcctcagctgccgcgttctctggacgatcagcagatcgcgctggcggtgatcaacaccacctacgccagccagatcggcctgacgccggcgaaagacggtctgttcgtggaagataaagactcgccttacgtcaacctgctggttgcgcgcgaagataacaaagatgcggaaaacgtgaagaaattcgttcaggcctatcagtctgacgaagttgacgcggccgccaacaaaatcttcaacggcggagcggtgaaaggctggtaagcgcttattcacccattttattcctataattgcaagacgggccaaggcccgtcttgttatttccgccatagcttgcttcaatagcgccactttcattaaggcagaggaatctcaatgcgtgttttacctctctgtttgttagcggtcgcgctggccggatgttcatcgcagcgtatcgcgccgtcctcaacaagcagcaccagcaagccgaccaccaccgctccggccaagaccacgccggccgcccgccccgctccggtaaaactgtacaaaagtgcagaagagctcgtgggcaagccgttccgcgatctgggtgaagtgtccggcgaatcgtgccaaaccaccgtgcaagactctccaccgaatctggccaccgcccgtaaacgcatgcaaatccgtgcgtcttacatgaaggccaacgccgtgctgctgcacgactgccagattgtcagcggcgtcgccggttgctatcaacaggccgtttgtcagggctcggcgcttaacgtctcgtccaaatgaccgaattcgttttcgagcagatcggcgtgatccgctcgccctataaagagaaattcgccgtgccccgccagccggggctggtcgaagacggcggcggcgaactgctgctgctgccgccttacaaccaggcggaagcggtgcgcggcctcagcgatttcagccatctgtgggtgatgttcattttccatcaaaccatggagggcggctggcgcccgacggtgcgtccaccgcgtttaggcggcaatgcccgcatgggcgtgttcgccacccgctccaccttccgccccaacccgctcggcatgtcgctcattgagctgaagggcgtacgggtgaaaaacggtgaagtggcgctggaactgggcagcctcgacctggtcgacggcaccccggtggtggacatcaagccttatctgccgttcgccgagagccagccgcaggcccgcgccggctttgctcaggccgcgcccgccggcgatatgcccgtgcgtttcgcaccgcaggccgagcagcagctgcagcaacatcaggcgcgctacccgcaattaaggcgttttatcagccaggtgctggcgcaagacccccgtcccgcctatcgtaaaggagaggacatcgaacgggattacgccgtctggctgttggatttcaacgtgcgctggcgcgtcgtggacggccacaccgaagtgttggcgctcgacccgcgttaaaattccgccgcctctcttttggcgacccgctcgcgctggtaaactaaaccacttttgtcacttttggccgccactctggcagcccgatgcaatttgcagttctaacggaaccaaaacaccatgcgtactagccaatatctgctctccactttgaaggagacacctgccgacgccgaagtgatcagccaccagctgatgctgcgcgccgggatgatccgcaagctggcctccggtctttacacctggctgccgaccggcctgcgcgttctgaaaaaggttgaaaacatcgttcgcgaagaaatgaacaatgctaacgcgatcgaagtttccatgccggtggttcagcctgccgatctgtggcaggaaagcggccgttgggagcaatacggccccgagctgctgcgcttcgtcgaccgcggcgaccgtccgttcgtactgggcccgacgcatgaagaagtgatcaccgatctgatccgcaacgagatcagctcgtacaagcagctgccgctgaacttcttccagatccagaccaagttccgtgatgaagtgcgcccgcgtttcggcgtgatgcgttcccgtgagttcctgatgaaggatgcctactccttccacacctcacaggagtctctgcaggagacttacgacgcgatgtacgaagcatacagcaaaatcttcagccgcatgggcctggatttccgcccggtgcaggcggataccggctcgatcggcggcagcgcctcgcacgaattccaggtgctggcacagagcggtgaagacgatatcgtgttctccaccggttccgatttcgccgccaacatcgagctggcggaagctgtcgcgccggcagagccgcgcgctgcagccagcgaagagctgcgcctggtggatacgccgaacgccaaaaccatcgccgagctggtcgagcaattccagctgccggtggaaaaaaccgtgaagacgctgatggtgcgcgccaccgaagagagcggccataaactggtcgccctgctggtgcgcggcgatcacgaactgaacgaaatcaaggcagagaagctggcgcaggttgccgcgccgctgaccttcgccaccgaagaagagatccgcgccatcgtcggcgccggcccaggctcgcttggcccagtcaagctgccgatgccggtggtagccgatcgcagcgtagcggcgatgagcgatttcggcgccggcgccaacgttgacggcaaacactacttcggcatcaactgggagcgcgatctgccgctgccgcaggtggccgatatccgtaacgtggtggaaggcgacgccagcccggacggtcaggggacgctgctgatcaaacgcggcatcgaagtgggccatatcttccagctcggcaccaagtactcggaagcgatgaaagcgaccgtgcagggtgaagacggccgcaaccaggtgctgaccatgggttgctacggcatcggtgtcacgcgcgtcgtggccgccgccattgagcagaaccacgacgaacgcggcatcatctggccggacgccatcgcgccgttccaggtggcgatcctgccgatgaacatgcacaagtcattccgcgtgcaggcgctggcggaagagctgtacaacaccctgcgctcccacggcatcgatgtgatcctcgatgaccgcaaagagcgtccgggcgtgatgttcgcggatatggaactgatcggcgtgccgcactctatcgttatcggcgatcgtaacctcgataacgaagagatcgagtacaagaaccgccgcgtcggcgagaagaaaatgatcaaaaccggcgaaatcgttgatttcctgctgggccagatcaaacgctaagcgccgatcgccagagaataaaaaacccgcctaggcgggtttttttatatccgaaacgcgttacttgctgctgcagcttttactgcggtcgaacgcgatcttgccgtccggcaccaccgctttttcaatctgcccctcttccatcgacggctgcacgctgaagtgcgcgttgaaggtcaggaacaccggctcgccggcagtcttattggccttggcgtaaccttgctccagcgcgatgttgttatccaccgggaaagtgatgcctgtggcgcaatctttgaacaccgccgcgtcggccatatagctgtagctgcctttcatcaccatcggggttttaggcaacggcttttcgaccggctccagacggtaattcagcttggactcgatcggcgcgccgctgcgatccagcatctccaggctcttgcccaccggacggaagtagcgtttctcgccggtgctgtcggtcagcaccagcttatccgcggtgcgcgcccatttgccgtagtcggcaaaggtctgatcgccgtctttgctgccgcgataggtttcctgcagcacgaaggtgccgtcttcatccaggaacagcgccgtatccagaccgccgcaatcggcgcaaggcaacaccccttgataactctgcggcatcgcctgcagcggttgttccttcggttgataatgattgttgcatcccaacaacgagagtgcgcctgccgccaagaacagggctatcgtaattttcttcacagttattctcctactgtgttcatgtattcctaagtgcgaaccttgccgcgcagcgccttggtggcgcctttacgcgtcttgccttccaggcgacgcagtttcgctcctttcgtcggcttggtcgccttgcgcgttttttccaccaccatcgcctgctgaatcaacgcgaccagcctggccaacgccgcttcgcgattcaattcctgactgcgatactcttgcgccttgataatcaccacgccatcggcggtaattaaatggtgattcagcgccagcagcctttccttataatactctggcaggctggatgcccggatgtcaaagcgcaaatggatcgccgttgaggttttgttcacgtgctggccgcccgcgccctgcgcgcggatagccgtcaattccagctcattatccggtatggcgacgtttcttgacagttccagcaccggtcacacctgcgcccgctgccactcggcaaactggatttccagactattctgagcatcggacagccaaatagttccttcctgcagcgtcgcctgcagcgtcatggtgcggctggccagcgccgtcagccgcgccagctgctcgtcgtcgaggaagcgtacgctcaggttcttgtaaccggccactttgccctgcatcgcctgccaccaaacgtgcgcggcgcgctcgccgtaagcgtacaacaccacgcgcggcgactggttgcaggccttgcgaatgcgcttctcgtcaggcaaccccatctcgatccacatttccagcccgttatggtcgttgcgctgccagatctccggctcatcgtcggcgctcagccctttggtgaacaccagccgctcgtcggcatggcagatccaggccaacaggcgcagcatcatgcgctgttcattttcggacgggtgttgcgccagcgtcagcgtggcgtcgtgatagaagtgacgatccatatcagcgatattgaccgcggctttataaatggttgctttcagcgccatgggtgacctcgttgttattcggcgacagtgtacttgatcaggggtgaacgccgccagcgcagcccggctcggcgcagaacgaaaggcgtgtcggggtgctgataactccataacagctgtgctatagtcgtctaggataggataaaactccgagagcctgcgcctcatcgcgagagcggtcttgatgatgcagaggttcttaagggaggaaactgtgcaacaatactgtgagttagtacgccgtacttacgccgagattggcagtggagatcttggctacgtgcctgatgcgctggcttgtgcgttaaaggcattggacgatgtcgcagcgaacgacgcgctaccgtcctccgttagggaacaggcggcctttgccgccgctaacttattggtgagcgactatgttgatgaatgatgagtaccaacccatcaattgcgatgactacgacaacctggaactcgcctgtcagcataaacttattctgaagctggagttacgcgacggagaagtgatcgaggccaaggcgatcgacctgctgcaaaagaaacgcgttgagtatctgaccatcgaacagaacggccagcagcgcgacctgcggctggaccatatcagcagtttcagtcatccggaaatcggtaccgtggtcgtcagtctgtcggactgagcagcggtaaccccatcccaacagggcagcccaacggctgccctcgtcatttagggcttcaggctggcgtaataagccgccagatcggcgatatcgtcatccgacagccccgacacataggccttcatcacctcggcctggccgccgttgcgctcccctttcttatacgcctgcaacgcgtgctgcaggtacatggcgttctgcccggccagattcgggtacatcggcaccgtcaccttgccctgcgcgccgtggcacgccgcacaagcggcggctttggcctgaccggcggccgcatcccccgccgccaacgccggcaggctgaacaggccggcggccaacagcgtgatccccactaacttcatcagtgctcctcgcgattatgatttttttcccagcgcagccgccacgggcgttcgccttccggcacctgccccgcctcacagacgaatacgcccagcgcggcgatcagctgctcatcataataaatcaacgggatgcgttcacgctgccagggaggaatacccagctcctgccacagtttttttatcggccgcgaatgggcgcgccccacgatgcgcaccgcgccctgcacgccgccgaaacgaatgctaatctgctgcgatagcagcggcgcgcgcagcgccagatcgccctcaccggcaaccaacagccccagcccgtccggcaacgtcagcggctggtcaggccgccagggcagatgcacaccgcgcagcgccgccagcggcggcagcaggtgcagtcggccacggaaacggcggatctgataggcgccgagctgcagctgcggttcggcgtcttcccggctgagtgccacctcctcccacaggcgctgtagctgctcacgcgccggcatagtgacgttaaacaacgcgatccagcgccgcaacaaggcgaaacgccgtaccggcgaacagtcggtcaggccgtcgatcgccaatgagcgatccgccgccaacaggctttgcagcggttccgccagcagttcgtccagcagctgctcctgctcggcgcacaggctggcgctgcgcgccaccgccgaagcgaagtgcggccagcgctggttgagctgcggcaaaacctgcaaacgcaggaaattgcgatcgaagcgcgtgtcctgattgctgtcgtcatctatccagcttaaggcgtggcgctgcgcgtagctttccagcgtttgacgcgagcagcccagcaacggccgcaacagcaagtgctcgcccagcgtggcgcacgccgccatcgccgatagccccgccggcccgctgccgcgcttgagcgccaacaggaaggtttcgctttgatcgtcaaggtgttgggcggtaagcagcgcttctccctcaaccaatgctgcgctgaaagcggcatagcgcgccgcacgcgccgccgcttcgatgccgccctggcgggcatccacctgcacgtgcgtcaccgtcagcgggatccgccactcggcgcagcggcggcggcaatgctccacccaacggtcggcaaaggcgctcaggccatgatgcacgtgcagcgcacgcagctgcagcgccggacgttggcggcgcaacgtcgccagcagatgcagcagcacgctggaatccaggccgccgctgaacgccaccatcagccgctgctgcgcgcccagctggtccgctacctgcgtcgttaattgatcagtatccatcggtaggctttgtcacttctacatagctgcacgttaaccccgcctaccgccatcaatcaagcattaaccgtccgggcctggcgtcgcgtcagcagccaccagccgcccagcaccgcgatcaccgccagcgtgcacccggccgccccccagccgatctgggcgaaaatgcggccatacgcctgcatcgccgccccttcgatgtgatcctcggcggtctgattggcgatgatgcccgccagatagttggcgatcgaaccggtcgccagcatatagataccggtcaacacgccggtggcgccggggatattcagccgggtgatctgcgccatcgccaccggatcgataaacagttcggcgaagcccatcaccgccaggccggcgatcatcagccccatcgaacccggcccgtgcagccgcgtattgagcgccatcagcgtaaagccgacgccgatcaacagcagaccgaaggcgaacttgcaccagatgcgcagcgtccggtcgccagcgccaccgccgctcgtcagccaggccagcgccacgccgcccagcatcaccgcgcaggcgttaaccgactggaacagcgcggtcggcaccgtccagccgaaccagcgccggtcgacgaagtgatcgataaacaggctgatggagctgccgccctgctgggcaaaagcccagaacagcgtgcccagcagcatcagtacgatgatctgccacagcccccgccgctggccggcgtccgcacgcagcataatgcgcgccaccagcgccaccgccgccacgcacaccaacccgagcaaatagccggcccagtcgcgttcaaacagcagcgtgaagaacaacggcgacgccagcaacgccgccagcagccatccccagtgcggcaggcccaggcttctggcgcgcatcagcggggcattcacgccgcgggtgtggcggaaatggcgtccgcccagcagaaaaatcaccaggccggcgaacatgccgatcccggccaacgcaaagccgacgtgccagccatagcgctcggccgccaacccacaggcgatcggtgccaaaatggaaccgacgttgccggcggcgtacagcagcgagaagcccccttcgcggcgcgagtcctgcgccgggtaaagctcgcccagcaggcagctgatattggatttgaacaggccgtaaccgcagatgatgatcgccagcgccagatagagcgactgggcggagaccgcgctcaggccgagcacgatatgccccagggtcatcagcgccgcgccggcgatcaccgcgacgcggttgcccagcaggcggtcggcgagccagccgcccaaaataggagtgacgtaaactaacgaagcgtaagcgctgtagagatcgatggcgtggctgtcggtatagccgagttggtgggtcagatagaggatcagtaacgcacgcatgccgtaaaagctgaaatattcccaaatttgtatcgctacgacatagtagattgcgcgcggctgtgagggtgttttcatggtggtctcccatcagtcggtgaacgacaaaggggaagcgcgagcgcctcccctgtttttggctgcggttatttcgccttcagcactttcacccgataacgtccgtccgcctgacggtaggcgccgtgaatgtcggtttcaaagcccggataatgcgcgccgatttcgcacagcatctgcaggaactccagcaccggccggctctcttcggtcagcatctcgcccggcatcaccagcggcacgcccggcgggtatgggaggatcatgttggcgttgaccttaccgaccatctcttccagatagacctcttccacttcgccgtgcagctctttctggaacgcctgatacgggttcatcaccatggttggtagcacttcgaatgcgcggtacatcaggtccggcaggttgtgttgctccaccaggcggtgaatgttctgcgccagatcctgaatgcgcatgttttcatagaaatcaggcgcttcctgatacagcgaaggcagcatgtttttcacccgcaggttcaggtcgaacgaacgtttgaagtcggtcatcgcgcgcagcaggctgagcgccttggttttatcgatgccgatgctgaacaggaacagcaggttgtacggtccggttttctcgacgatgatgccgcgctcgtcgaggtatttcgccacgatgctggccgggatgccgaacggctgcatctcgccttccttgctcatccccggcgtcagaatggtgaccttgattggatccagatacatgtgttcattgtcgatgttcttgaaaccgtgccaggcgctgtcggagcgcagcggccagcattccggctcatcgatatgctccggctgccagacgtcgaagaaccagccgtcggactcgactttcaggcgtttgatctctttacggaacttgatcgcgcgttcgatagaaccgtggatcaggcgcttgccggcgttgcctttcatcatcgccgcagcggtttcggtcgaggccacaatgccgtagtgcggcgaagtggtggtgtgcatcatgtaggcttcgttgaaggtctcttcgttgatgtcgcccttcacgtggatcatcgacgcctgcgagaaggccgccagcagtttgtgggtggactgggtttcatagatcaccttgccctccacgcggccgccgctcatgccacacttgcctttatagatcgggtggaaattggtgtaaggcacccaggcggaatcgaagtggatagacttcacgtccagggtgttcttgataaagtcggtgttgtacagcaggccatcataggtggagttggtgatcaccgcgtgcaccggccaggtggcgttcggggtatccttcacgcgtttggcgatggtggcgcgctggaactcgctctgcggaataccgccgaggatgccgtaagcgttgcgggtcgggcggaaatagatcggcgtgatgtcgctcatcatcatcaggtgagtcagcgacttgtggcagttacggtcaatcagcaccgtgctgcccgccggcgccgaatacatgccgacgatcttgttggcagtggaagtgccgttggtgaccatgtagctgcgttcggcgttgaacacgcgagaaatatactcttccgcctctttgtgcgggccggagtgatccagcagcgatcccagttcagacaccgaaatcgagatatccgacttcatggtgttcgggccgaagaaatcgtagaacaggctgccgaccgggcttttctggaacgcggtgccgcccatgtggcccggcgtacagaaggtgtatttgccttcgcgcacgtatttgaacagcgccttggtcagcggtggcaggatggtgtcgatatattcgtcggtattctgtttgatcttggcggcgatgtcggttgccgcgccgagcgcatactcgaagaagcgcacctgcatgcgcagatcgttcaggctgacgtccagcgtcgaataggtgttggcgaaggcgtacagcggcatgtactcgttcagctggctgatctcttcgcacagctccaggttgtatttgtcccagtcgaagatcaccccgcacaagcgggcgttgttctcgatcagtttcagcaggtcttcgcgatcgttagggtaaacgatgcggaaatccagactttccagcgcctgatgcagttcacggataggctcttctttaaagtagacacccatgtgattcatgatggcgataacgttcatatgcatttctcctggcaaagcaagccccttcccgtcgcggctgacaggtcggaaagaaaggggctgggtaaattcagtcggtcagcggacgcgaatcagtgcgctttggccgtggtgttttcatcgaccgccgctgcgctggcagcctggcgggtattcattttccgggcgtagaacatcaggataatcaggctgatgataaaggtgccggacagttcgaaagagttggcgcccatcagcgcgatgaagcagaagccgcagccgcacacggaagcgatcaggctcagcaggttgcgcacgttgaccccttcaaagcggatcaggtctacgcaggagtagaagtaaggcagcatggtcagcagcaccgcgataccggtcagctcgccgaacaggtcggacgctttgccgccggcggagctcatcagggtgatcagcaccatcagcgcggtcattttgcaaccggccagcagcaggcctttcttcggaatgccgtttttatccagctcgccgtacactttcgggaagttgccgtcgttggcggcgcgcaccccggcctggccgaccagcatcatccacgaaccgagcgaggtcaggcaggcgaaggcggtgaaggcggaaaccatcggtgcggcccagttgcccataatcgccgaggcgctgatggcgaacggcgcgccgctggcggccatttcagacgccgggaacatgccgctgatcacctgggtggcggcgatgtagatgatgcccgccagaccggtgccgagcatggtcgccagcggtacggtgcgtttcgggtttttcaccatgccggtgctgaccgccgcggattccacgccgatgaacgcccacaggcacagcaggatacttttgatgaccgcatggctgtcggtggtgccggaggtattccagttagcctggtaggtggcggcgtcaaaccagtgccagccgagggtggcggtcacgatcaccgggatcagcaccagcaccaggcccagggtggtcaaacggctgacccaggttccgcccagcatgttaacgaaggtgaagacccacacgatggcgatacaggcgatgccggcgggcaccgggttgttcagcgccgggaagaaggtggagagataagaaacggcggtaatgccgatggccaggttaccgatccagttggcatggtaataaagcacgccggtctggaaaccgaaagccggggaaatttcaccggcgtaggcgatagggccgccctgctgtgggtttttggtggcgaggcgggcatacacataagccagcgacatcgccccgataatcgagatcacccatccccaaatggcgatggatccgagactcgccaggttggcgggcaataaggcaatcccgctccccatcatattaccggcgaccacgccggtgcaggcaataagccctattttcttgggtgaagccatggtcagtttctcctgatttacgtttcttataagccacgcccataaataaaagattttaatgagccggcttgatagtcaggatgctaaccatcggggggaataaagtcctaaagataaagtgagattacgctcatgatcatacaaatgataacctgaggttttttattaacacatcaagataaaaagacaggctaaagaaaagataaacatcatttaaaaacaaaaagatgacaaggttaataacgcataacaaatggcaaaaaagagataatatcgcgcagcaaaataatacattcatgcaacatgacttcaccaataaataacgccgccatgatccccgaagaataagagcggcgtgatattgggttaattattggcgctgatagttatttaaataaggcacgacgttggtcaatgacgtctggaatacgccattggtgatccaatgcaaggtatcctcaccggggcgaagattgaaggcggtaatataagagtcggccgccaaatgattctgcccctgcatttcatacaccttgcccagcagcacataattcagccacgacatttgcaattcaatccccagatcgatcgcccggtgcgcctcgtcaatgcgcccctgcgtcaaggcatctaccgccagaacctgctgcataatcggcgtgttcttcaattcggggatcgtcgccagatggctgatatcggcgcgcagttgccccaaggccgggctgtcgaacggttgataagaattgcgcagcagatccaccaacgctttttcagccagcagatagcggaagttcggcgcgctgttaatcagctcgctcagctgggcgctggcgcgggtcaacgaatcggcgtcaccgcggatcagcaactgatgcgcctggtagaaacgctgcagcaacggcccgttgtccggcagcaactgcgccagacgctgctccagctgtggcggccaaggctgcttcagcgccgcggacaggctggcgaggaagtcggtctggatcttcagctggttatcggcggtgatgaagtaacgcttgtccaacatgatcgaactgtcggcgttatccaccagccgcacggagaggaaacactgctgggcgcggtagtggcgctgattgacgaactcgatatacagcgacttgcccgagttgctggggccggaatagttgtagttggtctggtcgtgcaccaggaaggtcgagtaagtgttcaacgaatcggtaatcagctcgctgacgcccaccacataagagagctgcggcatccagttgctgcagctctcgccgccctgaatgcggatatcgatatcgcgcgggttgagcagcaccggcatggtcgataccggcacgcgctgcgacaacgtggcgatgccgacaaacgccacgcagacgcttagcgcactcagaaacgccagccacacccagaacgtcgagcggcgataaaaatgtggcttcttctcgccgggcgcggcagccggcacgcttgcccggcgcggcggcacatagggcgtatcctcttcatcatcgctgccgtcttccggctcatgcatgatcaccgcgatctgcggcgccggtgcaatcgcgggttgtgtctccccctcttcacaccagatcaccgacgtcgccagcttatacccgcgcttgggcacggtgataatgtattccgggctatcgctgtcgccgtctttcaggtacttgcgcagctctgaaatacattgggtcaccacgtggttggtgacaatattgcgcttccagacgttgtcgatcagctcgtcgcggctcagcaccacgtcggggtgccgggcgaaatagcacagcatgtcgatcaggcgcggttccagcgttttctggcgaccatcgcggctgatggtgttgtcggcaggagtaaccagccactccccgacgcgaaaagcaggctcttgcatggcggaaataactctgtaggcatgtagggcaagggcgcgatcatagcataaccgcccccggctgtggccgccgggaggcgattaagccgttaactctcgtataattctaacggtaaaccatcgggatcgctgaaaaaggtaaagcgggattgggtgtagggatcgacacgcaccggttcgcaggcaacgccggccgcctgcagatgagcgatagcctgatcgatgtcgtcgacgctgaacgccagatggcgcaggccgcaggcctccgggcggctgacgcgagccggcggcgaggggaaagaaaacagctcgatggtgtattgcccgttgagcgccagatccgctttccaggagccgcgctcctcacggtagacttcgctcagcagggtaaacccgagaatgtcgcagtaaaaacgcttgctggcggcgtagtccgcgccaatgatcgcgatgtggtgcacctgacgtaatgccagcatagaaaccctctcctgttcattctgatggggcacggtatccggcggcggcaatgccgtcaatgaaaaagcccggcttatcttgccaaaccgccgggcgcgttatggccttatgtctgcggggctttcagcaccttcaccagatagcacccgtcttccgtcagtttggcgccgtggatatcggtttcaaaaccgggatagcgctcaccgatcgagcatagcatcagcaggaaatcgagcaccgcccggctctcttcggtgatcatttcccccggcatcaccaacggcacgcccggcggataaggcaggatcatattggccgccaccttgcccaccagctgatccagctcgcaggtttcgacattgccgcgcacctgctcctggaacatctggtgcggcgtcagcttcatttccggcagcacgtcgaacgcccgctgcatcaggcctggcagatcgtgttggcggatcaggcgatgaatgccggcggccagatcctggatgcgcatatggcgatagaaatccggatcttcggcgtacagatccggcagcatgttcttcacccgcaggttgagatcgtaggcgcgcttgaagtcggtcaggccgcgcagcaggctcatcgccttggttttatcgatgccgatgctgaacaggaacagcaggttgtacggcccggtcttctccaccacgatgccgcgttcgtcgagatacttcgccaccagcgccgccgggatcccctcttcctccagcgcgctcagctcattcatgcccggcgtcaggatcgtcaccttgatcggatcgaggtacatatgatcgcgatcggtctggccgaaaccgtgccagttatcgtccggatccagcggccagcactgcgcctcatcgatctcttccggctgccagatatcgaagaaccagctgtcgctttcctcgcgcagccgctgcacttcacggcgaaaatgcagcgcgcgttccaccgaacggttgatcaaacggcgccccgggttgccgcgcagcatggcggcggcggtctccatcgacgccacgatgccgtagtgcggcgaagtggtggtgtgcatcatgtaggcttcgttgaaggtgctctcatcgtagtcacccttgatatgaatcatcgaggcctgcgagaaggcggccagcagcttgtgggtggattgggtttcgtagaaaaccttgccgggcacccgctcgccgctcatgccgctcttgccgtcgtaaatcggatggaagttggtgtaaggcacccaggcggagtcgaagtggatcgacggcacctccagcgtctgcttaatgtagtcggtgttgtacaacaggccgtcataggtggagttggtgatcaccgcatgcaccggccaggtggcgttcggcgtcgcctgcacccgggcggcgatgctctcacgcgtgaattcgcgctgcgggatcccgccgaggatgccgtaggcgttgcgcagcgggcgcagatagatcggcacgatatcgctcatcatcagcaggtggcacagcgatttgtggcagttgcggtcgatcagtaccgtgctgcccgccggcgccgaatacatgccgacgatcttgttggcggtggaggtgccgttggtgaccagatagctctgctcggcgttgaaggtgcgcgcgatatactcttcggcctccaggtgcggcccggtatgatccagcagcgaaccgagctcggtaaccgaaatcgagatgtcggccttcagggtattggcgccgaagaagtcatagaacaggcagcccaccgggcttttttgaaacgcagtgccggccatgtggcccggcgtgcagaaagtgtacttgccttcgcgcacatagttgaacagcgccttggtcagcggcggcgtgatggtgtcgatatattccgcggtgtactgctggatgcgctgcgcgatgtcgtccgccgcgttcaggccgtactcgaagaaatagagcaccatgcgcatttcatgcaggctgacgtcgaaggtggagtgggtattgataaaggcgtacagcggcaggtattcgttcagctcgttgatctcgctgcacagctccaggctgtagtcgtcccagtcgaagatcaccccgcagatgcgggcgttggcttcgatcagcttcagcagatcaccgctgtttttggggtacaccagctggaatcccatggcggccagcgcagcgtggagctcgcgaatcggctcatctttgtagtagacgcccgtcgggcccatgatggcgatgatattcatcggcagctcctgtcagttaacggccaagtctctataacaccacgaaaatccggcggtgtgtagccaaaaaaaaaccgcccggaggcggtttcttgcagcgaagcacagaactcagcagtagccgtagttcatcagacgctggtaacggcggttgagcaactcttcgtcgttcagaccatccagatctttcagatcggccagcagctgcgcttttagcgcggcggccatcgccggcacgtcgcggtgcgcggaacccagcggctccgggatcaccgagtcgatcagcttcagctctttcagacgcggtgcggtgatgcccatcgcttctgcggccagcggggccttatcggcgctcttccacaggatggaagcacagccttccggcgaaatcaccgagtaggtgctgtactgcagcatgttcaccttgtcgcccacgccgatcgccagcgcgccgccggagccgccttcgccgatgacggtgcagatgaccggcacgttcagacgcgacatctcacgcaggttgcgcgcgatagcttccgactggccgcgttcttccgcgcccacgcccggataagcgcccggggtatcaataaaggtgatgatcggcatcttgaagcgtgcggccatttccatcaggcgcagcgccttgcggtagccttccggcgccggcatgccgaagttgcggcggatcttctctttggtttcacggcctttctgatgcccgatgatcatcaccgggcggccatccaggcgcgcaatgccaccgacgatcgctttgtcgtcagcgtaagcgcgatcgcccgccaactcttcgaagtcggtaaagatgtgtttgatataatccagggtataaggacggcgcgggtggcgtgccaattgggcaatctgccaggccccaagatcggcaaaaatcttgcgcgtcagctcaacgctcttttcacgcaggcgctgaacctcttcgtccagattaatatctaatttttcgtcttgacggctgactgcagtcagcgagtcaattttcgcttccagctctgcaatcggctgttcaaaatcaagaaaattcagactcatagcattcctattttagtcaaattccaagtccacctgctcattgcctaccaacgtccgcaagtcgatcaacaagcggtcggtgggcgtcacgcgccaggttgcgccaaaacgcagcttggctcgcgcatcttcccgttgatagtagagatgcactggaatcgtccccgatcgatggggttccaacgactgacggagacggttcaaaagctggtcatcaatttgcctgtcagtcagcgagatagcaagcccgcgagcgtatttttcccgggcttcactgatgtccattacctcgcgggccatcattttaagcccgccgctaaagtcatcaaagctgacctgtccactggcgataaggatacggtctttttccaacaaatgctggtatttttctaacgcttcggtgaataacatcacttccagacggcccgaacggtcatccagcgtgcagatgccgatgcggttgccgcgcttggtcaccatcacccgcgcggcgaccaccaacccgacggcggtagtcattttgccccgatccgtcgggtgcatgtctttcaaacgctggccaccggcgtaacgttcgatctccttcaggtactgggtgatcgggtggccggtcaggtacagccccagcgtctcccgttcaccgtccagcaccacctgctccggccagggcgcgatattggcgtaggattgctctacctgctccggcgcttccgccagcacgccaaacatatccacctggccgatagcttcggctttcgcatgctgatccgccgctttcaacgcgtcgccgagcgaattcatcagcgcggcgcggtgcggcccaaggcgatcgaacgccccggacatgatcagtttttccagaatgcggcggttcagtttcttgatgtcggagcgcgcgcagagatcgaacaggtctttgaagtaaccttgttcgccgctgttgcgcgcctcgataatcgcctcgattggcccttcccctacgcccttgatggcgccgatgccgtacacgatctcgccgtcgtcgttgacgtggaagtgatacaggccgctgttgatgtccggcggcaggatcttcagccccatgcgccagcattcgtccaccagccccaccactttgtcggtgttgtccatatcggcggtcatcaccgccgccataaactcggccgggtagtgggccttcagccacagcgtctggtacgacaccagcgcataggcggcggagtgcgatttgttgaagccataaccggcgaatttctccaccaggtcgaagattttcaccgacagttcaccgtcgatgccgcgcgctttggcgccgtcttcaaagccgccgcgctgcttggccatttcgaccgggttctttttacccatcgcacggcgcagcatgtccgcgccgcccagcgtgtagccggccagcacctgggcaatctgcatcacctgttcctgatacaggatgatgccgtaggtcggctccagcaccggcttgagcgactcgtgctgccactgaatgtccgggtaggagatctcttcacggccgtgtttgcggtcgatgaagttatccaccatgcccgactgcagcggccccggacggaacagcgccaccagtgcgatcatgtcttcgaagcagtcgggcttcagacgtttgatcaaatctttcatgccgcgcgattcaagctggaacaccgccgtggtttccgagcgctgcagcatgtcgaaacttttcttgtcgtcgagcgggatggcggcgatgtcgatcggttccagcccggtcttggcgcgccgggcgttgatcatctccagcgcccagtcgatgatggtcagggtgcgcagaccgaggaagtcgaacttcaccagcccggcgtattccacgtcgttcttgtcgaactgtgtcaccgggtggttcccttcggcatcgcagtacagcggcgcgaagtcggtgatcttggtcggcgcgatcaccacgcccccggcgtgtttaccggcgttgcgcgttaccccttccagcttgcgcgccatgtcgatcagcgccttgacctcttcgtcggcctcgtaaatttccggcagctgcggttcggcggcgaaggctttctccagcgtcatgcccggatccggcggcaccagcttggagatgcgatcgacgaagccgtacgggtgccccagcacgcggcccacgtcgcggataaccgctttcgccgccatggtgccgaaggtgatgatctgcgataccgcttcgcggccgtacatctccgccacgtgctcgatcacctggtcacgcttctccatgcagaagtcgacgtcaaagtcgggcattgagacacgttccgggttcaggaagcgttcgaacagcagatcgaactccagcggatcgaggtcggtgattttcaacgcataggccaccagcgaaccggcgccggagccgcgccccgggcccaccggcacgttgttgtccttcgaccactggataaactccatcacgatcaggaagtagccggggaagcccatctggttgatcaccttcagctctacgtccagacgctcgtcatattccgggcggcgctgcgcgcgcacttcaggatcggggaacaggaactccagacgctcttccagcccctctttcgatttgagcaccaggaagtcctcggtgctcatatcgccggtcgggaactgcggcaggaagtattcgccgaggcgaatggtgacgttgcagcgcttggcgatttcgacgctgttcagcagcgcttccgggatgtcggcgaacagttcgcacatctcgtcttcgctgcgcatgtactgttgcgggctgtagttgcgcggccgcttagggtcgtccagcgtaaagccgtcgtgaatggcgacgcgaatctcatgagcgtcgaagtcatcttccaccaggaagcgcacgtcgttggtggccaccaccggcaagccgcgctcagtggccagcgccaccgccgcatgcaggtagttctcttcgtcctgacggccggtgcggatcagttccagatagtaacagtccgggaaatgctgctggtagaaatccagacactgatccacctgcgcctggttgccgcgcagcagaaacttgccgacgtcgccctgacgcgcaccggagagcaggatcagcccttcgcgatgttcaatcagccagtcgcgatcgatagtcgggccggcggcgccgtagccgcgctgataggcgcgagaaatcagcagcgtcaggttctggtagccttcgttgttgctggccagcaccgtcaactgagccagttcatcgcccagctcttcgctttgcacatggaaatccgcgccgatgatcggtttgatcccggcgccgtgcgcgctgccgtagaatttcaccagcccgcacaggttggtgaaatcggtgattgccagtgcaggcatggctaacgcggcgactcttttcaccagcggcgccgtcttggccaatccatcaatcatggagtagtcactgtggacgcgcaggtgaataaaacgaggttcggccatctccagatacctgattgaaggggctcagcaggctgagcccgggttaatgctatcgtcgagccggtcaggctcgcagactacagcgccagcgctcttttcaccggcgcgaaactgcggcgatgatgctcggtggcgcccagcgcggccagccgctccaggtggaaggcggtcgggtagcctttatgctgcgcgaaaccgtagtccgggtactcgctgtccagctcggccatttcgcgatcgcgcgtgaccttcgccagaatggacgccgcgctgatctccgccacgcggctgtcgcccttcaccaccgcctgcgaacgcatcggcaagctcgggcaacggttaccgtcgattaaaaccatgtccggcgcgatatgcaacccggccaccgcgcgctgcatcgccaacatggtggcgtgcaaaatgttcagttggtcgatttccgccggttcggcgcgccccaggctccaggagagcgccttggcgacgatttcgtcatacagcgccaggcggcgtttttcactgagtttcttggagtccgccagaccgacgatcggctgcgccggatcgaggatcacggcggcggtgaccaccgcgccgaccaacgggccgcggcccacttcgtccacaccggcaatcagcgtggcagcgggatagataaagggttcaatcatgctttcgccagctccaacacagcctgagcggcctgttcgtccgcaccgcaacggatgctttggtgcaaggtaaggaaagtctgtttcagcgcgtcggtttccgggctctcttccagcagcggcatcacggcggcggccagtttgtccggcacgcagtcatgctgcaacagctcggtgacgatctcgcgccccgccagcagattcggcagcgaaacgtaaggcgtttttaccagcttctgcgccaaccagaaagtgaacggcttcatgcgatagcccaccaccatcgggcacttggccagcatgcactccagcgccgccgtaccggatgccagcagcgccgcgtcgctggcgatcatcgcttcgcgcccctgcccgttcagcaggtgtacggtcaaatccggtgcaacctcggccttgatgcgctcaaactgctcgcgccgtttggcgttgaccagcggcaccaccacttccagctcgggataacgggtgcgcagcagctgcgcggttttgaggaaatcggcgctcagcatctcgacttcggcgccgcggctgcccggcagcaaggccagacagcgcgcctgcggagcgatgccaagctgagcgcgcgccgccagccggtcgggctgcaacggcatggcgtccgccatagtgtggccaataaaccggcaggggacgttgaaacgatcgtaaaacgctttttcgaaagggagaaaggccagcaccaaatcggtggctttgcctattttgaaaacgcgcttttgtcgccaggcccacacggaagggctgacgtagtggatggtgcgaatgccgcgctgcttgaggcggccttccagcgtgatgttgaagtccggcgcgtcgatgccgacaaacacgtccggccgcagctcaccgaagcggcgggtaagatccttgcggatcttcaacaggcgtggcaaacgctcgagcacttccaccacgcccatgaccgccagctcttccatttcgtaccaggcttcgcagccttcggcctgcatcagcgggccggcgacgcctacgaaacgcgcgccggggatctgcgccttgagcgcacggatcaagccggcgccgagaatgtcaccggaggtttctccggcgaccagtccgatagtcaatggacgattcgacataactcagcgaatgatgccacgggtggaacgggtgaagaaatcgaggtattgctgcaccaccggctgttctttggccagggcttcgatttccgctttcgcttcatccagcgttttctcgctgcgatacaggattttgtaggcgttgcggattgcctgcatttcatccttgtcaaaaccgcggcgcttcaggccgaccgcgttgacgccgaacggcgtagcgtggttgccctgagcgatgacgaaaggaggcacgtcctgagcgacaccggaacaaccgcctaccatcacatgcgcgccgataatgcagaactggtggatcgccgtcatgccgccgatgatggcgtgatcgtcgatttccacatgccccgccagcgtggcgttgttggccagcacgcaagcattgccgaccacgcaatcgtgggcgacgtgcacgttgaccatcagcaggttgtcgttgcccactttagtcaggccggtaccctgcgcggtgccgcgatgaatggtcacgctttcgcggatgcggttgcgatcgcccacttcaacgcgcgtcggttcgcccgcgtatttcagatcctgattcacttcgccgatagaggcgaactgataaatctgattatcgcagccaatcttggtaatgccgttcaccaccacgtgggatttcagcaccgtgccggcgccgatttccacctgggagccgacgtagcagaaagggccgatatgcacgttggcgccgatcacggcgccttcttcgactatcgcgctaggatggataaaggcggtttggtcaatcacggattaagcctcccggctgcgggcacacatcatggttgcttcgcagacaattttaccgtcaacggtcgccacgcctttgaagcgagtcagaccgcggcgagttttctcgaaggtgacttccatgaccatctgatcgcctggcaccacagggcgcttgaaacgtgcttcgtcgataccggcgaagtaatacagctcgcccggctccagtttgccgacgcttttaaacgccagaataccggtggcctgcgccatggcttccaggatcaatacgcctgggaaaatcggtttgccagggaaatggccctggaaaaacggttcattcaccgatacgttcttcaccgcacgcagatatttgtgctcttcaaactcgaggacgcggtcgaccagcaagaacgggtaacggtgaggaagcagatccaaaatttctgcaatatccagagtatgagtgtcagtagtcaaaatactcttcctgtctctaaaaactgatggcatcaacaacacggcctgcgctgaccccaaaaggagatcatcatgcaggccgcaaattaacatctctttgcgcttttggtctcacgaccaacgcgtttcgttttgtacccgccagggcgggcggcaatgattagtcttttccgactttacgttcgacagctttcaagcgtttgctgatctcatcgatattcatcaccaacgcagcggttttacgccaaaccttgttaggctgcaacggaatgcccgaagagtataccccaggttcggtgattggtcgcataaccattcccattccggtaacaacaaccttgtcggcaatctccatgtgaccgttgatcacgctggcaccgccgatctggcagtagcggccgattttcaggctgccggccatgatcacaccgccggcgacggcggtattgtcgccaatcacgacgttatgtgcaatctgacattggttgtcgatgataacaccattcccgatttgggtgttatccaaagcgccgcggtcaatggtggtgcaagcgccgatttcgacgcgatcgccgataatcaccgtgcccaactgagggattttgatccactcgccgcgctcgttcgcatagccgaaaccgtccgcgccaatcacggtgccggactggatcaggcagcgctggccgatttcaaccgcatgataaattgtgacattcgcccacagacgcgttcccgcgccgatgcgtgcgtgtttgccgatgaagcagcccggaccgataaccacgttatcgccaagcaccgcacccgactcaatcaccgcgtttgccccaatggcgacgttctgccccagctgcgcttcaggcgagatcaccgcgcttggcgcgatatcctgcgctggtgccggcgtagtgtccatcagttgcgccatgcgcgcgtaggtcagataagggtttttaaccaccagcgccgcagcacggcagtgtggtaaatccgcttcggtaagcaccacggcgcttgcctggcaggaagacagctgctcttgatagcggctgtttgacaaaaacgtgatttggccaggctgtgccgaatgcatagaagcaatgccggtgatgacgagatcgccatcaccgtgcaattgtgcatccaactgctgcgctaaatcagccagtcgaattgaaagcatgtgttatttaacctgtttcagcacgtcagcagtgatatctttggaagagtctgcataggcaacggcgttggcgtcgatcaccacgtcataaccgcctttgctggcgacagatttcaccgcgtcctgaatacggctcaggatcttgttacgttcttccatctggcgacggcggttgtcctgctcgaaagcctgggctttctgagagaactgctcgcgttgcgccatcacgtctttttccaacttgctgcggtcgctggctttcatggtagcgccgtcacgctgcagacgttgcattttggtctgcaggctacgttccatgttctggagttcgcttgcacggcctttaaactcgttttccagctgtttagcgaccgcttcgcgggccggcagctgttggaaaatgctggagacgttaacgacagcgatcttatctgctgcctgaacgccagctgaagcagccattgctaaaccgaggcctgcggcacacaaccactttttcactataaactccttaccatcacccatttgtgtcatatgacactgaagtacacaatttgccagacttgtcccaccaaacaatgagaatcatctccctctgccggcgggcgcctggccattgcgattcttaataactgttatgcccagaggcgagacccgttaccaggtcttaccgatgttaaactggaactgttcggacttgtcgccttcgtatttcttgatcgggttggcgtaagagaacaccaatggccccaatggcgacatccactgcagcgcgataccggcggaagaacgaatattgctggccttgctgtagtccggcacgccgtacatcagcgtttcgtcggtattcttccacttggtatcccacacggtaccggcatcgatgaacagcgaggtccgcaccgagttggcgtatttctcgctgatgaacggcgtcggggtgatcagctccaggctggcgaccgccatggcgttaccgcccaccgcgtcatccgagctacagatgctctgacgcgaggtcgtgctgccggcgttgaactgacactggtacgagttggagttgtagtacaccgccttcggaccaatggtgttggactggaagccgcgcacggtgctcgaaccaccggcgtagaagttctcgtagaacggcatttccttgccgcccaacccatccgcgtaacccagacggccacggcccaacagcacccaggtgcgatcgtcgttgatcggcacgtactgtacgctgtccagcgtcaccttgtagtattcgttgtccgagcccggaatggtgaccttaccgttcaacgtggtgcggttacccgaggtcgggaagtagccgcggtccaggttgttgtaggtccagcccaggttcagcgtaaagtcgtcggtcgagtagctggcgcggtcggttttgttcgcatccacgcccatcgagtcgaggtaacgccacatggcgatctgcggctgcatgttcgacaggccgttgtggacgtagcccaggccggtacgcaacgagttgttttcgttgatcgggaagcccagcgtgccgtcgataccgtaactcttgttggtatagtccgacagatccgcgtcatccgccttaaagtcgttgtagaagatgcggccgcccaggctcacaccgtcaacggtgaagtacgggttggtgaccgacagttcggtataggtctgatagtcgttcttggtgccgctgatgccgaccgagtacccggtacccaaccagttatcctgctgcacgcccgcctggaagctgacgccgctctcggtgccgtaaccgacgccgaagttgaaggtaccggtgttgcgttctttcaccttgtaggtcacatcgacctgatcggcggtgcccggcacgcgctgggtttccacgtcaaccgtttcgaagtagcccagacggttcagacgctctttgccctgctcgacctgctcgttgccaagccaggcgccttccatctggcgcatttcgcgacgcagtacggaatccttgctggtgtcgttgccttcgaacttgatgcgacgcacgtagaagcggttgcccgcgtcaacgttgacgtgcagtttgacggttttatccgcgtcgttgatctcaggctgagtgccgacgcgcgggtaggcgtaaccataacggcccaacatcgttttgatgttgtcttccattttggtcaccttgctgccgttgtacagctcgcctggctcgattttggtgatctgagcgacttccgccgagtggccggccagattgccgttcacgacaacatcggaaagcttgtactgctcgccttcggtgatgttgatggtgatgtagatgccttttttatccggcgtcaggctcacctgggtagaatcgatgttgaagcgggcatagccgcgatccagatagaagctgcgcagggtttcgagatcgcccgccagtttttgcttctggtatttgcgatcgccgaccaggttccaccatggcacttcgtcacgcagttggaagcgtgagatcagttcgtcgttggtgaaggcatggttgccgacgatgttgatttgttgaatcttggcggagaccccttccgtgaacaccagcttcaggtcgacacggttgcgcggcaacggcgtgactacggctttcaccgaggcgctgtatttaccgacgctgtagtagaagtcttccagccctttttcaatgctggagatcgtggtgcggtcgagcgcctcgcccacccggacgccggaggcttccaggttctgcttgagcatgtcatccttcaccgacttgttgccggagaaagtgatgctggcgatggtaggacgttccttcacctgcacgatcaaggtattaccatcgcgcagcacgcgcacgtcctcgaagttgccggtggcaaacaaggcacggatggtattactgatgtcatcgtcagtgacggtatcgccgacgcgaaccggcatgttgagtaacgccgcaccgacggcgactcgctgcaggccttcgaaatgaatgtctttcactacgaacccgtctgcaccgtatacggtggcgctgccaaacagcagcgacgctatgagcaactttttcatcgccatcgttgttatgcgttcttcctaacctatccccgcccctagaggcgggaaaaatcattgaaaagtgcaagacccatcaacaacaccagcacgatcgaacctatgcggtagctgtagtcctgtactcgctcggaaaccggcccacccttcagcttttctatcgccaggaagaggagatgcccaccatctaacaccggtaatgggaacaggttgatgatacccaggttgacgctaatcaacgccaggaacatcagataatacacgaacccgactccggctgacgccccagctccctgtgcaatcgagatcgggccactcaggttgttcagctttacatcaccggttattaatttgcccagcatgttgaccgtcagccgcatcagctgccaggtcttgtcgccggcctgatacagcgccgggaacggtccatactggcgaatcgttttatactcgtccggcagcggcagcacttttggaatgatgcctgcaaaccccaccgatttgtcttttcccaccggctttgtatccggtatcagcgtcaaagacaagggggcaccgtttctttcaatctccaaagccagcggttgccccgggccatcgtggatacgcttcaccagcgtctgccaacgacccaacggctgaccatcgactttaacgatcctgtcccccgcttgtaaacccgccttttgcgccgccgagttaggctgcacttccgccaacacggattcgatctgcgggccgcgcggcataatgcccagcgcgacaacgggatcctgcttgtccggttcaaagttccactggcgcaagtccagggttttggtcaccacctgcgaagagccgaacggcgcgacgccgacctcggtttgcacatcgccaatcttcgccaccagcgccagacgaactgactcccaatcaggcgtttcgatgccgtcaaccgactttagttccatgccagacgaaatttcggccttggcggcgatggattgcggcgcgatttcgccgatcaccgggcggaaactcggcacgccgatgatgaacaccaaccaataggcaaggatagcaaacaggaagttggcgatggggccggcgctgatgatggccgcgcgctgccagacggttttgttgttgaaggcctgatggcgcatttccggcgccaccgactccacgcgctcgtccagcatcttcacgtagccaccgagcggaatcaaagcgatgacgtactcggtgccctggcgatcggtgcggcgccacagcgcccggccgaagccgatggagaagcgttcaacgcgcacgccgcaacgacgggcaacccaaaagtgtccgaactcgtgcacggtaatcaaaataccgagcgcaatcagaaacgccaccaggttccaaagcacgctgaccatcatccctcactttccgtcattgacggattaaaacaccaacagcatcaggcaggcaaacacaggcaccgccgcggtcaggctgtcgatacggtccagtatgccgccgtggccgggaatcaaatgaccgctgtccttgatgcccgcttcgcgtttgaacatgctttcggtcaaatcgcccagcaccgaagccagcgcggcgatcaccgaacaggccagcagcgtggtcggcaccacgttcagcggcgcgtagcggccgaacagccaggaaatgaccgccgatgtcagcagcccgccgatcaacccttcccaggttttacccggcgagaccttcggcgccagcttatgcttgccgaacagcttgccgaacatataggcgccggaatccgcgccccacaccagcagcatcacgtacagcagccaccaggcgccggtaaacgggttttgctcatagccgaactggcgcagcgccagcatgccccaaaaaaacggcacgatggtcagcaggccgaacagcaggcgtagcgggcgcgaattgcgccagatggcggccgagccggggtaaaacagcaccagcagcagcgccgccagccaccaggccagcgacagccacagcgagccgcttacctgcggcacggattgatggtaggcgggaacgctgagcatcatcagcgccagcagaaaaccgcacagtatcgccagccagatgcgctgcgaacgggaggtaaaaccggccagttggccccactcccaggctgctaacatgcacacgacgagcgttaccagagcaaaggccagcggcggcaacaggaacagcgccgcgataacgatcgggattaaaatcagagcagttatgaggcgatacttcagcaaaagttctccctaggacgcatcggcgccgataggtgttgttcccccgaagcggcgctcacgttgtgcaaatgcattcagcgcaccttcaaagacaagttcatcgaaatcaggccagagcacatcagtaaagtaaagttcagcataggcgatttgccacagcaggaagttactgatgcgatgctcgccaccggtgcggataaccagatccaccggcgccaggtcgctcatgcaaacccgttcgctcaataattcctcgctgatctgatccgggtgcaactccccgccccgaacctgctcggccagttcccttactccctgaatgatatcccaacggccgccgtagttggcagcgatattgagcgtcaggccatcgttattttccgtcagtgcttcagagcggcggatccgctcctgcaaacgcgcgctgaaccggctaatatcgccgatcacccgcagcctgacgttatgtttatgcaggctttttacttcactatccaaagcgcggacaaaaagctccatcagggcagaaacttcctgcaccggacggttccagttttcgctgctgaaggcataaagcgtgagtgcatctaaatggtggctggcggcaaaactgaccgcgcggcgaaccgatttcacccctgctttatgaccgaagacacgtaacttgccctgacgtttggcccagcgtccgttaccgtccatgataatggcgacatggcgcggccccggggaagatggattagcctcttgttggtttgcggacgacataactcgtacttatttcctcaatagaaatataactgcctttccggaacatcagacccttacgcgcaaaaaaagccgtgtgcccgacacggctttcagcctgccctcgcgatacccgacgcagccgggtcgccattggcgcacaaggcgccaatcgagccataattcaacggtataaccgctgacaggtggcgcagactataccacctcagcggggcatgaacaaacggccccgcggcggcacgcgcgaattacgagcaaaatcggataatcaccgtgatcggccgcacaacgtgcgaacgcgttcctcggcggcggcgcgcgcctggcggtcaatgtctaagaccgcttcgatgctggtcggttcctgcagcgcgagacgctccaccacctggcgattgaccgccgcaatgtcggtaaagcgaatctgctgctgcaaaaatgccgccacggcgatttcattggccgcgttcagcgcggtggtcgccgcctggccggcctcgaacgcttcgatcgccaaatacaggcaaggataacgttcgcgttccggttcagcgaaggtcagcgaaccgatgcggcagaagtccagcgcttccacgccggagttcacgcgctgcggatacgccatcgcatgggcgatcggcgtgcgcatatccggcgtacccaactgcgccagcacgctgccgtcggcatagcgcaccatcgagtgaatcaccgactgcgggtgcaggatcacttccatttgctcggccgaggcgttaaacagccagcgggcctcaatgtattccagacctttgttcatcatggtggcggagtccaccgagatcttgcggcccatcgaccagttcgggtgggcgcaggcttgatccggcgtcatcgcggcgaactgttccagcggcgtggtgcggaacgggccgccggagccggtaagtacgatgcgcgaaacaccatgactgtccagtgaagagtatcccaactggcgctgaatactctcaggcaaactctgaaaaatcgcgttgtgctcgctgtcgagcggcagcagttgcgcctggctttgccgcaccgcgtccataaacaggcggccgcaggtgaccagcgactctttgttggccagcagcacctgcttacctgcgcggatcgccgccagcgtcggcaacagccccgcagcgccaacgatggccgccgtcacttgatcgacgtcgtccaaagccgccagttcgcaggccgcttgctccccggccaatacctcggtagcgacgccgttttccgccagaatggcgcgcagctcgcgggcggcgctttcatccgccatcgcggcgaaggcgggccggaattcgatgcattgctgcgccataaccgcgacgttgcggccggccaccaacgctttgatcgcaaaacgctcgggattcgccctgaccacggccagggtgctggtccctaccgagccggtcgagccaagaatggtcagttgcttcatgagttcactctgaataactgtctgatgagatcggaggtgctccagtgtggaaccttggacagcgcttgtccatgatctttcagtacgatgaaacgggatctgcgccacaaaaaacaaagcgccgcccaggcgacgctttttttctgcgcgatactgattagaaatccatcagctctttttctttctccgccaacgcggcgtcgaccagcttgatgtaagcgtcggtcattttctgaatctcgtcttgtgaacgacgttcttcgtcttcgctgatctctttgtctttcagcagcgccttgaccttgtcgttggcgtcgcgacgcacgttacgcaccgctacgcggccctgctcggcttcaccgcgtacgatcttgatcagatccttacggcgttcttcggtcagcggaggcagcggaacgcgaatgtcagaaccggcggaagacgggttaaggcccaaatcggagctcatgatcgctttctcaacggcctggctcaggctgcggtcgaacacgttgattttcagcgtgcgggagtcttccacggtcacgttggccagctgacgcagcggggtagcggcgccgtagtattccaccatgatgccgtccagaatgcttggcgaagcgcggccggtgcggatcttgctgatttggtttttgaatgcttctacgcttttttccatgcgtgaatcagcatcttttctgatttcattagtcacgttgcaaacccttggaagctggttacttggcaggcgatactcaagtatagcccgtaatcgtactcggagagcgcgcggcgcctggcgtcacgcgctccgaaaaggggtgtgaacagccttatttgctgatcagcgtaccttcgttctcacccatcaccacgcggcgcagcgcgccaggcttgttcatgttgaacacgcggatcggcagaccgtgatcgcgagccagcgtaaacgccgccagatccatcactttcagctcgcgctccagcacgtcctgataggttaattgttcatacagcgtcgcatccgggtttttcaccggatcggcggagtagacgccatccactttggtggctttcagcaccacgtccgcttcgatctcgatgccgcgcaggcaagcagcggaatcggtggtgaagaacgggttgccggtaccggcggagaagatcaccacgcggttgttgcgcagcaggctgatcgcctctgcccagctgtaattgtcacacacgccgttcagcgggatcgccgacatcaggcgggcgttcacataggcacggtgcagtgcatcacgcatagccaggccgttcatcacggtagccagcattcccatgtggtcgcccactacgcggttcatgccggcttgcgccaggcccgcgccgcggaacaggttcccgccgccaataactacaccgacctgaattcccagttcgaccagctctttcacttcctgagccatgcgatccaaaacgctggcgtcgataccaaaaccttctgcaccttgcagggcttcgccactcagtttaagcagaatacgctgatatacgggttttgcattggttgccatggtgttctgtcctaagaagcagtattagtattggggatttcagccgatgaaacgcgcctgaggtgagtatcacgctgcagggcttgccaccggtgtaattctggctggatagtatggaaccgccagacggcggttccatcgacagtcattaagactgtttgctcatcgcggcaacttcagcagcgaagtcggtttcgactttctcgatgccttcgcccacttcgaagcgaatgaagttggtcacgtcagcgttgtgctctttcagcacctgagcaacggatttgctcggatccataacgaaaggctgaccggtcagagaaacttcgccggtgaatttcttcatgcggccttcaaccattttctctgcgatttctttcggcttgccggactgcatggcgatgtccagctgaacctggtactctttttctaccacttcagcagacacgtcttctggcttcacgaattctggcttgctcgccgcaacgtgcattgcgatttgcttaaccagctcttcgtcagcgcctttagccgcaaccagaacgccgatacgcgcgccgtgcaggtagctgcccaacacttcgccttccagggaagcaacgcgacgaatgttgatgttttcgccgatttttgccaccagcgctacgcgctcttcttcgaactgtgctttcagcacgtcaacgtcagtgattttgccagccatagcggcatccagcactttgtcggcgaacgcctggaaaccggcgtcttttgctacgaagtcagtctggcagttaacttccagaatgatgccgtagttgccttcgatcttggttttgatcacgccgtcagcagccacgttgcctgcttttttagcggctttgatcgcaccggacttacgcatgttttcgattgccagttcgatgtcgccgttggattcaaccagcgccttcttgcaatccatcatgccagcgccggtacgctcgcgcagttcttttaccagggcagcggtaatatcagccatttctttttcctcggttatctcgcgtggagacagttctcattcagataagcaaagggggccttaacaggcccccctaaccaacatatgtcaatacctggttaataagggctcagtgacgagcttgccttattattcagcttctacgaagccttcttccgcctgaacggccagatcttgagaacgaccttcacgcacagcggcagcaacagcagtcaggtacaggtttactgcacggattgcgtcgtcgttaccagggatgatgaagtcaacgccgtctgggttggagttggtatcaacgatagagaataccgggatacccaggttgttggcttctttgatcgcgatgtgctcgtgatcggcatcgataacgaacagtgcgtctggcagaccgcccatatctttgataccgcccagggagttttccagcttggccagttcacgagtgcgcatcagcgcttctttcttggtcagcttgtccagggtgccgtcttgagactggatttccagatctttcaaacgcttgatggactgacgaacggttttccagttagtcagcataccgcccaaccagcggtggttcacgaagaactggtcacagctgttcgcagcgtcttttaccgcttcgcttgctgcgcgcttggtaccaacgaacaggatcttgcctttacgggaagagatcttggtcagttcagccagagcggcgttgaacattggtacggtctgctccaggttgatgatgtgaaccttgttacgagcgccgaagatgaaaggcttcattttcgggttccagtaacgggtctggtgaccaaagtgaacaccagccttgagcatgtcgcgcatggaaacagttgccatgattaaacctctatagattaattggggttatgcctccacgtatcccataacgccgaccctggcggcgacaagtcacctcagggcaccccggcggatgtgccgatacgtgtgtgttatttacacaaaatgagtgcagttaaagtattttcggccgattcccgccaggtcacaagaaccaagtcgcggatcgccggcgcgctttataccataaacccgccgccgacaccaacttttgttgcgtttcgccgggcgtcaggaaatgaaatttggcagcccccggccgggctgataccataagtcactgcttcttattgtcgacgataacgacacctgcggacgaatttcatggcaatctcaattaaaacacctgatgacatccaaaaaatgcgcgtggccggccgcctggccgccgaagtgctggagatcatcgagccgcacgtcaaacctggcgtgaccaccggcgagctggaccgtatctgtcacgagtacatcaccaacgagcagcaggccatctccgcctgcctcggctaccacggcttcccgaaatccgtgtgcatctcggtgaacgaagtggtgtgccacggcatcccgagcgacgacaaaacgctgaaagacggcgacatcgtcaacatcgacgtgaccgtgattaaagacggtttccacggcgacacctcgaagatgttcatcgtcggcaaaccgaccattctgggcgagcgcctgtgccgcgtcactcaggaaagcctgtatctggcgctgaagatggtcaaaccgggcatccgtctgcgcaccctgggcaaggccatccagcaattcgtcgaggccgagaaattctccgtggtgcgcgagtactgcggccacggcatcggcgaagtgttccatgaagagccgcaggtgctgcactatgacgcggacgacggcggcgtggtgctgcaggcgggcatggccttcaccatcgaaccgatggtcaacgccggcgactatcgcatccgcaccatgaaagacggctggacggtaaaaaccaaagatcgcagcttgtcggcgcagtatgagcatactattgtggtcactgataacggctgcgagataatgacgttgcgcaaggatgacaccatccccaacatcattacgcacgagatgtaagcactgcggcgcacgccgcgtgcagaatgtcaccaggccggcttatgccggccttttttatgggctgcgcactatgtctgacaatctccttcaaccggctgtgccgatgccgcccgcctctcccagcgtctacggcgacgacgagctcacctgcccgctgctgaaacagcggctggagcagttccagctgtggctggcggcggcgttcgacgccggatccagcgccgaaagcctggtggcggcgcgcagcgacttcatcgatcgcctgctgcgccggctgtggacgttctacggctttgaagatatcccggaaaccgcgctggtggcggtcggcggctacggccgcggcgagctgcatccgctgtcggatatcgacgtgctggtgctcagccagcgccggctgacggagcaacagtcgcagcgggtcggcgaattcatcaccctgctgtgggatctcaaactggaagtgggccacagcgtgcgcaccctggaagagtgtctgctggaagggctggcggatctgaccgtggccaccaacctgatcgaatcgcgcatgatctgcggcgacgttgcgctgttcctgcagatgcaaaaacatatcttcagcgacggcttttggccttcgccgcagttcttccacgccaagatcagcgagcaacaggagcgtcatcagcgctaccacggcaccagctataacctggaaccggatatcaaaagcagccccggtggcctgcgtgacatccacacgctgctgtgggtggcgcgtcgccacttcggcgccacctcgctggacgaaatggtcggcttcggtttcctcacccaggccgagcgcaacgagctgaacgaatgccagagcttcctgtggcgcatccgtttcgcgctgcatctggtgctgccgcgttacgacaaccgtctgttgttcgatcgtcagctcagcgtcgcgcagctgctgcgctatgaaggcgaaggcaacgagccggtcgagcgcatgatgaaagacttctaccgcatgacgcgccgcgtcagtgagttgaaccacatgctgctgcagctgttcgacgaagccatcctggcgctggacgccaccgaaaagccgcgcccgctgaacgacgatttccagctgcgcggcgatctgatcgatctgcgcgatgaaacgctgttcatccgcgagccgcaagccatcatgcgcatgttctacctgatggtgcgcaaccgcgagatcaaaggcatttactccaccaccgtgcgccagctgcgccacgcgcgccgccacctgaaacagccgctgtgcaccatcccggaagcgcgcgatctgtttatggccatcctgcgccaccccggcgcggtgtcgcgcgcgctggtgccgatgcaccgtcacagcgtgctgtgggcctatatgccgcagtggggcaagatcgtcgggcagatgcagttcgatctgttccacgcctataccgtcgacgaacacactatccgcgtgctgcagaagctggagagcttcgccgagcctgaaacccggccgcgccatccgctgtgcgtggagctgtacccgcgcctgccacacccggaactgctgctgctggcggccttgttccacgatatcgccaaagggcgcggcggcgatcactcgatcctcggcgcggaagacgtggtggagttcgccgaactgcacggcctcaactcgcgagaaacccagctggtggcctggctggtgcgctgccacctgctgatgtcggtcaccgcgcagcgccgcgatatccaggatccgacggtgatccagcagttcagcagcgaagtgcagagcgaaacccgcctgcgctatctggtgtgcctgacggtggcggatatctgcgccaccaacgaaaccctgtggaacagctggaagcagagcctgttgcgcgagctgtatttcgccaccgaaaaacagctgcgccgcggcatgcaaaacagcccggatctgcgcgaacgggtgcgccaccatcgcctgcaggcgctggcgctgctgcgcatggacaacatcgacgaagaggcgctgcaccgcatctggagccgctgccgcgccgattacttcctgcgccactcgccgaatcagctggcctggcacgcccgccacctgctggcccacgactccacccagccgctggtgctggtcagccgccaggcgacgcgcggcggcaccgagatcttcatctggagcccggatcgcccttacctgttcgccgccgtcgccggagagatggatcgccgcaacctgagcgtgcacgacgcgcagatcttcaccaaccgcgacggtatggcgatggacacctttatcgtgctggagccggacggcagcccgctggcgcaggatcgccacgcggcgatccgccaggcgctgctgcaggccatcacccagcgggagtaccagccgccgcgcgtacgccggccgtcatccaagctgcgccacttcagcgtgccgaccgaggtcaccttcctgccgacccacaccgatcgccgcagctacctggagctgaccgcgctcgatcaacccggcctgctggcgcgggtgggcgaagtgttcgccgatctggggctgtcgctgcacggcgcgcgcatttccaccattggcgagcgggtcgaggatttgtttatcctggccgacggcgagcggcgcgcgctcgaccaagaaacgcgcagaaagttggagcaacggttgacagaggccctcaccccaaacgataaaatgtgatacaagtaactttttaccgacaacatcaggaaagagaacagcatgcagcaattacagaacgttattgaaagcgccttcgaacgccgtgcggacatcaccccggcgaacgtagacaccgtaacgcgcgaagcggtaaaccaggtgatcggcctgctggacagcggcgccctgcgcgtcgccgagaagatcgacggtcaatgggtcacccatcagtggctgaagaaagccgtgctgctctctttccgcatcaacgacaataaggtgatggacggcgcggaaacccgctactacgacaaagtgccgatgaaattcgccgactacgacgaagcgcgcttccagaaggaaggcttccgcgtcgtgccgccggccaccgtgcgccagggcgcgttcatcgctcgcaacaccgtgctgatgccgtcttacgttaacatcggcgcctacgtcgacgaaggcaccatggtcgacacctgggccaccgtcggctcttgcgcgcagatcggcaaaaacgttcacctgtccggcggcgtcggcatcggcggcgtgctggagccgctgcaggccaacccgaccatcatcgaagacaactgcttcatcggcgcgcgttccgaagtggtggaaggcgtgatcgtggaagaaggctcggtgatttcgatgggcgtgtacctcggccagagcacccgcatctatgatcgcgaaaccggcgaaatccattacggccgcgtgccggcgggttcggtggtggtttccggcaacctgccgtcgaaagacggttcttacagcctgtactgcgcggtgatcgtcaagaaggtcgacgccaaaacgcgcggtaaagtcggcattaatgagttattgcgcactatcgactaaattgaaatagcgggtgattcacccgctatttttttgtctgcgtttcgctggcagtcacagtcgcagatctcgctttccgccataatcgcagtcgtggaatataacgatcacatctaaagagggcgcagtatgtacgataacttgaagagtttgggcatcaatcaaccggaagacgtcgatcgctatagcctgcgtcaagaggccaacaacgacatcctcaagatctatttccgcaaggacaagggcgagttcttcgccaagagcgtgaaattcaagtacccgcgccagcgtaaaaccgtggtggcggacaacgccggccagggctacaaggaaattcacgagatcaacccgaacctgcgttatgtaatcgacgagctggatcagctgtgccagcgcgatcaggtggaagtggatctgaagcgtaaaatcctcgacgacctgcgccatctcgaaggcgtggtgtcgcacaagattgccgagatcgaggccgatctggaaaaactcacccgcggcaaataatgcggatcggttgacccgcatcatcgccaaggcgcccttttgcggcgcctttttactttacgattgcagcagcgtgccccactgctcgacccacgggcaggcggccacttccggctccggctgttccatcgcatcgatctccagcacttcgccaacgcgggtggcgccctgctcctgcagcagcgcgtcgaacgcgcgcccggcgccgcagaagttgtcatagctgctgtcgcctagggcgatcagcccatagcgcagctccggctgatagccaacccgatcgcggatagcgtggaacagcggcgcgatgctgtccggcagatcgccctgcccggtggtggaggtgatcaccagcgcgtagtgctgacgataatactgccaggcctccagcgtgccctcttcgaacagtttgacctcatggccctgctcgctgaggatgttttgcgcctcttccgccaccagcagcgaattgccgtagaccgttcctacgaagataccaacctgagccatggctcctactcccttcattacctttaaaaattgtcagctatcctgaccgttagccgcgctaaactcaaccccggcaagttcagggaatagccccgcccagccgaactgcgccatcaccccttgccagtcttcgtcccagcgcgccgtcacctgcagcggttcgccggtcaccgggtgcgtcagctgcagatggctggcgtgcagcatcaggcgcgggcagccgaaatgctgcgccatcccgcggttctgccgcagatcgccgtgcttgctgtcgccgatgatcggatggcgaagatgcgccatatggcgccgcagctgatgtttgcggccggtttccggctgcagttccaccaggctataccgcgcgctgtcgtagcggccgacggccaccggcatctccacctgcgccaacggccggtagtgcgtcaccgccggctgcggccccttgtcggcatcggcatgtttatcggcgattttgtccagttccgccgtcagcggataatcgagagtcgccccctcctgcacgtaaccccgcaccaccgcatggtaggttttctgcacctgatgttgttcgaactgctgcgacagcaggcgcgccacctcgctggagagcgccatcagcagcacgccggaggtcggacgatcgagacggtgcacggtaaaaacgtgcttcccgagctgatcgcgcaccgtctgcatcataaagcgggtttcatgacgatccagccaactgcggtgcaccaaccaacccgacggcttgttcaccgccaccaggtgttcatcctgatacaaaatctcaatcacatcacgttcccaggtcaatagccgtttcgggcgcgagtataacaggcatgagacgcaacgctagttcacccattcgatggtcaccagccgcgtatcggcgcggccgcgctcgtccaccgcccgaatgcggtagcgcccgttgtcgataggccgccagtcgatcggctttttgctggcgctgctgccgagatagatatcgtcgacgaaccagtacaccgtcttgctgtcggcgtccgtcaccgcattgaaggcgattttgtcccgtccctgctgcgactggcgcagggtataggtggtgtttttcagcggtgaggtgatgcgcggcgcgttgccgccgacggcgatgccgttgtccttgcagcgattgatcggcggcgcccgcttcggcaacccggcctgagcgaacacattggccagatcggaaggccagaactcaaagatttcggtgcgggtctgcgccgcatcatacggcgggcaaacgacctcaccgctgtgaatatccagcaccaccggccggtaaacgctgtcgaccttgatcggcgacttgccgggaataaaccaggtcttgcccttttgctggcaccacggcgtcggcagatcgccgctggcgagacaaatgtccacccgccgcagccgtttggggaacggatgcttcggttcccgcaggccggggtaactggcgttgacgctgtcgatgatgttgaagaacagcggcgcggccgcctcggcgccgaccaacgcattgttgccgcgcccgtcgaagttgccttcccacaccaccagcacataagggccgaaaatcccgacgctccaggcgtcgcgaaagccccatgaggtgccggtcttccagtacaccggcagcgacgaagaacgctgcgccagcgtatcgcccggccgccggtgctggcgcagcatatccagcgtgatgaaactggcctcctcgctcagcagccgtaccggcgtcgattcggcctggttcagctgcatgcgcagcggccgcagctcgccgcgattcgccagcagcgcatacagcttcgccaattcctgcgccgttacctcgccgccgcccagcaccagcgacagcccgtagtggctctcgttggccatattggcgacgccggtcaggcgcaagaactgataaaaggttggctgacgcagctgcgaggcgacatagaccgccgggatgttacggctgaaattcagcgcgtcggtggcggtcaccgggccgagaaagcgccggtcgaaattttccggcgcataggccccaaacgacgaaggcacgtctttcagaatggtcatcggatgcagcacgccctgctccatgcccagcgcgtagatgaacggcttcagcgtcgatcccggcgagcgtttggcgttggtgccgttcacctgcccctgaatagggcgattgtaatagtccgccgatcccaccagcgcgcgcacccccatatcgcggctgtccaccagcagcaccgcggcgttctgaatgccgcggctgcggttgcgggcgataaaggcgttgacctgccgttcgaccagccgctgcaacccggcgtccagcgtcgtgtcgacgcgggtatcgcgctgcaccaattgctgcgtctgcaggcgcagctgttcgataaagtgcggcgcaatatagggcacttgttcaggctgccgcagcgccaacggcaggcggaacagcgtttgctggctggcgtcggtggggtaaacctgttgccagcgcaggaacagacggttgcgcgcctgcgtcaatgcggcgccgagcacgccggttttcggctccagacggtagctgggtgactgcggcaacaccgccagcgtcagcgcctccggcagagtcaactcccgcggcgacttagcgaaatagatcaggctggcggcgccgatgctttcaatgttgcggccgtagggcgcgtaattcagataggcttccaggatatcgcgcttggagtagctcagttccagctgcaccgcacgcagcacctgcagcagcttgccgcccggcgtacgggtattgagatgccagcgcatgcgcgccagctgcatgctgatggtcgaaccgccctgcattttgccgccggcgacatagctgcgccagaaaccgcgcatcaggctgacggggttaaagccggggttatagtagaaccagcgatcttcgtgcagcagcaatccgcgcaccgccagcggcgacacttgctccagcggggtccacagccggtagcgatcgtcgttggccagcgtaatgcgcagcagcgcgccgtgcctgtcgtaataaacggaagactgcggcagcccctgccacaggggcggatgcggccacagccgaattgcggtcaacagcagcgccagtaaaaacaccgccatcaagccgttttgcagcacgcgcccggtcaggatcttcatacgttctcagcattccggcgccagacgctggcctggcgccggatacgcctagtcgttgtccgccggcaccaccaccagcttgccgccgccggccgacatggcctgcacgtcacggtcgtacatggcttcgccgtaggccggtggaacaataaagctgccggtattggtggctttgatttgataaacgaactcctgcacctcagtgccggcgctgccgtagatgatcacccgatcttcgcggatatcgctgtagtccggcgcccaggtggagccagatgcggccagcggcgactgccagccgccatgctcgtcgctctcctcgcctgcgtcggccggctccggcggcgtctgctgcaccacttcgaacccgcccggcagcagatcgacgatcgccaggttgctctgcccctctttcgagttggcgcgcaccttcagatggacgttgatcttctgccccagcgtcacctgcgtcaccggcttgccctgttcgtcggtgtaatcgcggacgatctcaatcccgcgcgacagcgctttttgcggcgcattcagatcgtaaccggcctgcgtcaccacataccaggccggcgcgctgccgccgttggtgaagcgcacggcggtagcgtcggcgttaaattgcccctgaacgaacagcccctgcagctcgctgatgcgctgcgggtcgccgccgcttttgcccacctgcacgatgcctaacgcgtccgcattggcggattgcgccgccacctgggccgaatagctttccagcgccagaatgctcattgcagaggagtaggtggtgtaacgctcttctttcagtgccttgaccatattctccagcacctgcggcgggatcgacgccaccttctcagggaagtgacgggtaatcagatacagccgcgtcgcatcctgcaccagcggatcgaaatagttctgcgtccaccaggcgctgtcataggctttgctcagttgctgccagctcggttgcaacagcgcggcggcttcgtcgtccatcttcaacaggcgataggaagaggccagatagagtgcgctcagatcggttttccagccttcgccatagcgtttttgcagcgtatcctgcaccgccgccagcgagttggtggtcacttcgccctgcagcgtcagcaggtaaaccgcccagctgcgcaggcgcagcagatacagatcgtcgaatccgctggccgccagctcgcgcaacgcgccgttggcttcatccagcatgccttccggcagggcgtagcccgccgctttggcttcgagcagatactgcaccacataaggcgtgacgaaaggatcggcatccggcgacgaacgccaggcgccgatcgccccgctgtcattctgacgggcgcgcagcacgcccagcagattgcgcagctgcttgctgacttccgcctggctcaggctgcttttcatctccggatgacggctctgcagcatcagcggaatggagcggctgacgatctgctcggaacagtaatacgggtaatccgccaggtattgcgccagcccgctggtcagcaccagcggcgaattcgacaccgccgcccggcgctgcgcgaaggcgtcgaacatctggcgcaggccgtcgacgttctggctgccgccgctcatgcgccccatcaccgactgggtgcggtacggcgccgccggccgtaccgaggtgctgacggtgcggcggctggcctggtcgccgtaacgggcgtcgaacaccagcggcgcatcacccagcacggctttggcgcgcaggcggaaggtgataacgccttcacgtttttccgccagcgtcaggctttgcgtcgcgttgcccaccacctccaactgcggcggcggcgtcagcaggacgttgatggccaccgactggccgttcagcccttcgaggttgttgctgacgcccacgctgacgtcgaactcgtcgcccggcgccaccatcgccggcacattcggcgtcatgatgaagctgtcgcgcaccgtggcggcggtttgcgccttgccgattttctccggcgtcaccgaaatcgccatgacgcggatcttgccgttgaagtaatccggcaccggatagacgaactgtttctcgccgctgacctcggtaatgccggaccaataggccaccggcttatcgcgcttgcgcttgaacgggttgaggttgagatccagcccttcgcccgcatcgccgcccggcgccgcggtcagcgccatcagcttgctgaattccggcaggatcagatcgaggatctgcgagctgctcacgttgagttcgcgcttgctgaagaagaactccagcggatccttcagacggtaacgcgccacctgcagaatgccctcatcgacggcgaacagcgccacctgctgcggcgcatcggtcttgaccgtcatcgtcaggttttcacccggcttgatgacctccggcgccgtcacctcgaggctgttttggcgcgccttggtgctgatcttgaacggcatcacgccgtagctcagcgggctcatgaagatctcgctggagttgatgtcgcgcacgaactgcacgttgatgtagccgttgccctccatgccggccggcacgcggatcgtctgcaccgagctggtggtgtcggtgtggaaccactgccaggcgtaaaccttgtccttttcaatggtgatcaagccgctaccggtataaggcgcgttgatcgccacctcgatctcctcgcccggctggtattccgcctggttgagtttcagcttcagttcggcattgcgatccagcgaacggctcaggttggcgttgccggccacgctgtaggcgacgcgattgagcgtcttgccctgcgcatcttcaatcaccagcacgaagtcgcccggcttatcggtcgccagccgcagatccgcgccctgctcgctcagcgccagcggctgttccgacagctgcacttccttcatcttcgactggtatttgtaaacgcccgaatcctgtttggtcagcaccgaaatgtatttctgctcgatcaacacctgcttcaggttcggcatggcgatctgtttcagggccggatcgatagcgatcacgttcagatgccgctccgcgtcgcggttgatgtagcccagatcgccgtcggccttcaccccaatcaggtaatcgtaaggcgaaaccagcgtacgggtggtcgccgccaccgagcgcccgccgccggcaacgaacgcctccgacaacagctgcagctgataagtggcgtcggcgtaggatttcagatcgagcggaatatcggccgcgccgtgctcatcggtggtgcgatcttccagctcggtctcgaacccgtcgctgttttgccggttttcgtagaacgcataatccgggaagcgatcgaagctcggatacattggccgcagcgtcagcctggtggtcacacggcgatcctgcgccggggtgccgaacaagttctgcacatcgatgctggccttcagctcggacggttttacccagccttgctggcggtcaggcgtcaacgccagcttcactttcagctgatccggttcgaactccttcacattgactgcggtatggccgagcagcgtggaggtatcgttatttttgccgatcagatacagatagacgttccactcgccggtaggcgaattttcatcggtggtatagctcagctcgttgaaaccgctggcgcccagcgtcagcggcacggtggacatcagcttatcgcgcggatcgcggatttcggcgcgcaccggcacgccggccaggccaacgccccagtcggcggcgcgggtgatcaggccgatgttaaaggtatcccccggccgataaacgccgcgatcggagaacaggtagctgctgagcgtgcgcggatcggtcggcgtttgttcaccggcaacgtcgaagcgcgagaaatccagcccgcgatcgttatagctgccggtcggcaggaaggagacatccccttctttctccaccaggaacatcaccggctggcgctcgttggtgtacacatccagcgccgggaaacgcacgtgcccatcggcgccggtggtttggctgagcagcgtcacgccgtttttggccaccaccgacacggtggcgccgctgaccggcgcgccgctttggatcgactgcacaaagacgtcgcgcgtcttgtcctgcgagctcttggcgacgatgcccagatcggtcaccaccacaaagcgcgaatcgccgacgtcgggctgttcttccccttcgctctcatcctgttcctgatcctgctcggcgcccgcctcttccgccgccggttttcgattcggctgccattcagacagcgtcagcaggaacaccccgcgatgggaactggcgttggtggagagatagcgggaaagatcgatgccctgatagttcacttcccccggccgctcgttgttgagcgccgtctggtatttgaaatgctcggtgaaatactcgtcgttgagccggttgaattccgtggaggagtattcccggcttttgaaggagacgatatgctgcagctggctcgggatcacccgcttgatgtccagccgcaggcccgccacgttgcgcgccgccacgctgatctgcttgtcgccgttgaccgacagcagcgagccctgcgacatgaactgcagcgatttcgggaactccggcacttcgaccacgcggtaaaccttcttcggcattttgtaaccgccggcggaaaccagctggttatcgatctcgagcagcacaaagcggtgcgccggggcgtcgaaacggaagctgaactgcggttggtaggcctcttccgcctcgttaagcgtcaacggcagcgacgtcgcctgcgccagcacgtttttaccgacgctgtcgaccgtccattgatagaaatcgtcggcatcgttggcggtctcggcatcgctcggatcgcgctgcggcagcagccaggctttcgcggcccgcgccagctctttatccttcaccgcatcgctgaaaccgaccaccagggcacgctgccctttgccgccgtcggtgtccaccacctgggcgctggcgtcgctcagcgccaggctgtacagggtgggaaccttgacccagttgcttttcgcctcttcgaccgcgttgccggccgccgtcgatttaacgcccttgccgacggtcagatgtaccgcgccgccctgatccagcgcctgcagcggctcggaatgcacccaggcgttcagttttttctcgtcatagaccagagagaagttcagctttttctcggaggtggcgctgccttctttcaatcccagcgaaatctgtttttcaaagctgccgacgtcaaccggcgcgttgaactgcaaattgaagatcgcgctgcgtttttgcgcattttgcggatcgcggtaatactcggcctgccccaggcggtaatcgaacgcgggcacggtgaaggcataacgggttttgactagcttgacctgcggcgccagcaaggtggcgggttcaagggtcacctcatatttcgcgcccatcggcagcggctttttcgccgtgaacaccagtgtcgactcattgctccatgcccactgcccttccgccgacggtttcagagtgatgccggcgctcacggttttgcccgccgcggttatcggcgcagccgagccgctgaaggtcaggctcaccgtttgcggcgcctgccgggcggcggcgtagtctatcggctcggggttggacaactcggcgttgatctcctgaaccaccatcggcgccggttcaatcggttggggccggttttgccaccagtgccaaccgtaaaatgcgccgcccgcaacgcctgccagcagcagcaggctcagaccgaccgctttcgggtgtttatccacgccgctttccagccgcaaaaaaccgcgcggcagcgcagcccaccaggccggcgcacgccagctgaggttgccgaccagcggtctcagcaaccgccccaacagcgacaacgccccgcccagcaggcgacaaacgcccttaaccagggtaaaaggcaaacgcaggataaaccttaataaatccattattgcagcacctcatcatcctaatgcagctcccggtcaaccgccgcggttaaaccgagccgaaagacgccgtcggctctcctgcccggcatccgcgcgagtactctacactgccgggcggcaaaaatctgcgcgccgccggcgcattacggctctttattcaacatcaaatccagctgttgcagcagcaccagcagcggcagactgctcggttcacgatctttcaacgcctcttcgaaataaggcgtgatggcgaagcgcgtcggcaacggcgcctcggcgtccaacaacgcatacatgcgcggcaagaacacccactgcagccaggcttcggccgacatgctgtcgatgcagaacggctcggtgctggagaaagcctcatgctcagggggcgcggcctgccacagcgccagatcgcgcatggattgttcaatcgcctgcaaactgcggcgcacctggttatgtatactcatctgcattcccgatctcttttcatcatggtattcagcgctctggctgaaaggcggcaaagcatagcatttttatagcccaaattcggcgcgcctgagacagctcgccgtttttatctggtgacgttcgccgtcgcgcggcacaataggcccaccgaattcaccacacagataaagattcatgtccgtaataacagagaaaaaaaaccacgcgacgcccggtaaggccatgttggcctcggtcaccggttatgccatggacgggtttgacctgctgatcctcggctttatgctgccggccatcagcatcgaattgggattatcctcatcggccgccggttcgctggtcacctggacgctgatcggcgcggtgctgggcggcgtgatctttggccacctcagcgatcgtttcggccgcatccgggtactcacgatcaccatcctgatgttttccctgttcaccggcctgtgcgccgtggcgcaaggctattgggatctgctggcctatcgcactctggcgggcatcgggctgggtggcgagttcggcatcggcatggcgctgatcgccgaagcctggccggcggagaagcgcaatcgcgcttcggcatacgtcggcatgggctggcagttgggggtgctggcggccgctttcctgacgccgctgctgctggaacacatcggctggcgcggcatgttcctggtcggcctgctgccggcgctggcgtcattcctgatccgccgcacgctgggcgaaccggaggaattcgtgcggcagaaagacgccgggcagccgctttccttcctgcagcgtttgcgcctgctgtttaaggatcgcgccaccggcaaggccagcatcggcatcttcattctctgttcggtgcagaacttcggttactacgggctgatgatctggatgccgacttacctggcgaaaaactttggtttctcgctcaccaagtccggcctgtggacggcggtgacggtcgtgggcatgacgttcggcatctggctgtttggcgtgctggccgaccgcttcgcccgctggaagattttcgtgctgtatcaggtcggcgcggtggtgatggtgatcggctacgcccagttgagcgacccgatgctgatgttgttcgccggcgccgtgatgggcatgttcgttaacggcatgataggcggctacggcgcgttgatttccgatacttacccggtacaggcgcgcgccaccgcgcaaaacatcctgttcaatctggggcgcggcgtcggcggcctggggccattggtgatcggcgcgctggtgacgcaggtgtcgttcaccgccgctatcagcctgctggcggcgatttacctgctggatatctacgccacgctgttcctgctgccgaaaaaacagggcgcaggcgatacgctgggcgcgattggttaacgctggcgatggattaagcagagaagcacgcacggcgggatagaacaaaaagttgggggcactgcgttaacagtgcccccggttcgttttatagccatcccgctacacagcgtgctccctgctcaatccttgaaaacttttcctgcggccatcctgaccaagtggtccttgcatcatcctgcagcatcgtcctgacgcggttcctcagccttcctgacccgccgacagtcctgtgccggctctcaatctccgtcctggaggtgtccctggtttctatcctgaaacatcctgggcatctcctgacgccatccttcgctcttgcctgagcgcatccctttcttcgtcctgaagctgcatcatcctgatgctttcctgctccgccggttccgttccggtaacgataagatcgcttaaattccccggaatcacaagggtttgggaggcgtctcacactaaattaagcctaagagttatcctaaagaaattctaaccaattgatctggataacaataatctcatagtctggaaaaaggtgggaaaaattaagagcgatctctcacaccccgtgtgagagatctcttacacgggcgacggcgaatccgccgcgcttcagtccagcaccgggcgcagcgcatcgaggaaattccccagcgtcgccgccaacaaggtgcgcttatcgctgccgaattgttccagcaccacgttgccgctaacgttgcacagcgacaccatcgtcatctcggattcggtggtcgccaggaacagcgttggcgacagtttgagacgtttttgcgtcaccagatgaccgatcaggttctcctgcaggcggataaaatcctcctcgctccagacctgcagcaggctcaggcgatgctccccaaattgcgcgctcatgtcgcccgcgtattgctgcgtgtaaaaacggtgcgcatccggctgcaaacgcagctccagcgcggcttctaccctctccagcgtcgccgccggctcgaaaggctgcggcaaccacaacacctcgtcctcgcgattctccacgatgcagggcgacggcacgccgtacaatgcctggctggccggcgcgtggccgcgcgcttgctgccacaactcgacatagcgttgagtgaattcacgcagagcgtgcgatacatcatggtccatattctttctcgcatacgttaaactgacggccattgtacctatctctgagcgaggtgacagcagatgtcctcctatcaagaccaccaggccctgtcagggctgacgctgggcaaacccaccgcctaccgcgatcgctacgacgccacgttgctgcaggcggtgccgcgcagcatgaaccgcgagccgctggggctgtatcccgacaacctgcccttccacggcgcggacatctggacgctgtacgaactctcctggctgaacgccaacgggctgccgcaggtggcgatcggcgagatcagcctcaacgccgacagcctgaacctgatcgaatcgaaaagcttcaaactgtatctcaacagcttcaaccaaaccccgttcgccgattgggaaacggtgcgcagcaccctgcagcgcgatctgtctgcctgtgcccagggcgaggtaagcgtcaccctgttcagcgtcgagcagctggaaggcacgccgatcgcgcgtctggccggcgactgcatcgaccagcaggatatccgcatcgacaattatgagttcaacgccgactgcctgctgaacgccgccggtgaagaggtggtggaagagcaattggtcagccacctgctgaagtccaactgcctgatcacccatcaaccggactggggctcggtgcagataagctaccgcggcggcaagatcgatcgcgaagcgctgctgcgctacctggtctccttccgccaccacaacgaattccacgagcagtgcgtcgagcgcatcttcaacgatctgatgcgctactgccggccgcaaagcctgacggtttacgcccgctacacccgccgcggcgggctggacatcaacccgtggcgcagcaacgtcgtattcgctcccgcgcacggccgcctggcgcgccaataagtgcgaaacattgctcaacaactgagctaacgagcggtttatgttggtaaaagcccagggacggcggtaaggttaaaacgaggctgcggccgggcagagcgcccgctgcgccgcagcacgccaaccataacgagatgctgttttgctgcgtatggattactaccgccccgcaccgggtgcaaaggagttaccttgattacacacatcagcccgcttggctctatggatttattgtcgcagctggaagtagacatgctgaagcgcaccgccagcagcgacctgtaccgcctgttccgcaactgttcgctggccgtgttgaactccggcagccaaaccgacaacagcaaacagctgctgtcgcgctatgaaaccttcgacatcaacgtgctgcgccgcgagcgcggggtgaagctggagctggtcaacccgccggaagaggcgttcgtcgacggccgcatcatccgttcgctgcaggccaacctgttcgccgtgctgcgcgacatcctgttcgtgcacggccaaatcgccagcgccggccgtttccagcacctgaacctggaaaactcggcccacatcaccaacctggtattttcgatcctgcgcaatgcgcgcacgctgcatctggatgaagatcccaacatggtggtgtgctggggcgggcactcgatcaacgagaacgaatatctgtacgcgcgcaaggtcggcagccagctgggcctgcgcgagctcaacatctgcaccggctgcgggccgggcgccatggaagcgccgatgaaaggcgcggcggtcggccacgcgcagcagcgttaccacaacagccgctttatcggcatgaccgagccttcgatcatcgccgccgagccgcctaacccgctggtgaacgagctggtgatcatgccggacatcgaaaaacgcctggaagccttcgtgcgcatcgcgcatggcatcattatcttcccgggcggcgtcggcaccgccgaagagctgctgtacctgttgggtatcctgatgaacccggagaacagtgaacaggtgctgccgctgatcctgaccgggccgaaagagagcgccgactacttccgcgtgctggacgagttcatcatgaacacgctgggcgacgaagcgcgccgccattacaccatcatcatcgacgatccggcggaagtggcgcggcagatgaaaaaagccatgccgctggtgaaggaaaaccgccgcaacaccggcgacgcctacagctttaactggtcgatccgcatcgcgccggatctgcaactgccgttcgagccgacccacgaaaacatggcgaacctcaacctgtatccgaaccagccgccggagcaattggccgccgcgctgcgccgcgccttctccggcatcgtcgctggcaacgtgaaggaaaacggcatccacgccattgagcagttcggcccgtacaagctgcacggcgaaccacaaatgatgaagcagatggacagcctgctgcagggctttgttgcccagcaccgcatgaagctgccgggcagcgcctatgtgccctgctacgaaatcgtcgcctgaccctcaatcccgggcggcgtaacggccgccctgttttttctgaccttaccgcccatgatgatacacctactgattgtcgacgccctgaacctcatccgccgcattcacgccgtgcagggctccccttgcgtcaacgcctgccgccacgcgctgcagcagttgctccagcacagccgcccgacccacgcggtggcggtattcgacgaggacgaccgcagcgacagctggcgccaccaaattctgccggactacaaggccgggcgctcgccgatgccggaaaacctgcagcaggagatgccgcagctgcgcgaagccttcgccgagttgggcgtcgccagctggcattcgcccggcaatgaggcggacgatctggcggccacgctggcggcgaaggtcgccggcggcggccaccaggtgaccatcgtctccaccgacaaaggctattgccaactgctggcgccgaacgtacaaattcgcgattacttccagaaacgctggctggatatgcctttcgtgcaacaggagtttggcgtgcagccgcagcagctgccggactactgggggttggcggggatcggcagcagcaagatccccggtgtggccggcatcgggccgaaaaccgccgtgctgctgctgcagcagtcgggcagtctggacgggatctatcagcacctggagcaggtgccggagaaatggcgcggtaagctggagcagcaccgcgagctggcctacgtcagcaaacaagtcgccacgctgcgcaccgatctgtcgctggacggcaacctgcagcagctgcgcctgccgatacaataagggcgctgcaagcagcgcccttcatcaggtttaacgcggttaatcgcgctcgtcgcggcggcccggcaccgccgaccacatgcggcgcacgtgtacggtgatctcttcacgatcgtgatacagctgcttggcgtgcacttcagcgctgatgccggcggcgctcaacgcttcgcggatgttcatcaggttttgcgacacttcctcatagcgctttttcatcggcagtttgaggttaaagatcgcttcgcggcaccagcctttcaccagccactgaatcatcaggctggtcaccttcgccggtttttccaccatgtcgcacaccaaccaatagatcttgctgctgttcggctcgaacttgaagccgtcggcgcggtgatgcgttacctggccggtttccatcaggctcggcgccatcgggccgttatccaccgaatgcaccatcatgctgcgtttcaccaactgataggtccagccgcccgggcaggcgcccagatcgaccgcgtgcatgccgctggccaggcgctcgtcccactcgtcggcggggatgaacacgtggaacgcttcttccagcttcagcgtcgaacggctcggcgcatcggccgggaagcgcaaacgcggaatgcccatatagaacggtgagttgttgttgctgtaggagtaaccgacgtagcagcagcccggcgcgatgaaaaacacatgcaccaccgggcgagttgggttctcgcgcgccatcagcaccttctgctcgcgcatcgcggcgcgcagcggcaccgtcagcttgcggcagaatttcatcagctctttgctttcgttggtgtccggcacttccacccgcagctcgccgccgcgatcaaccacgccgatcagcatgccgacgatcggcgatacccgatcttccggcggcagatcgcgcagcagctcccccaccacgatcatctggcgggcgaaaatcagttcgcggaacggaatttcccgcgccagacggtcggcatcgtccggctgatagcattcgaacaacacgtaaccgctgtgctcttttacccgcgcaaagccgtaaatctccagctgggcggctttatcggtgatctccgccgcacactctttttcaaagccggggcggcagtacaacgcaatcttattcatggcgctcggcctttttcctcagacgcaaagcgccaatcaacatcaatatccagccgatcaagaagcacacgccgccaaccggcgtgatatatacccagaccttcaggtgcgacagcgccagacaatagaggctgccgctgaacaacacggtgccgaacgccaacagcgccccgctccagtaaaaccacaggctcacgcggcgctgcatcgcgaccgccagcgccaggatagccagggtgtggaacccctgatactccagcccggtgcggatccaggccatttcgttggcgcccagcgtgccgcttaacacatgcgcgccgaatgcgcccagcgcgacaaatacaaagccgctgatagcggcgaaaaccagcatggaacggctgctcatcgtgatctatcccattaaaaatcaccggccgcggcaaggcggcggccggccttattgttcgtagcggaagcggaacttctcttgttcgctggcggcacgcgccaggatccactgccggaaggcggctattttacccagttctgcctggctgtcatgacataccagataaaaagcgtttttactgaccaacacatcgttgaacgggcacaccaggcgaccggcttcgatctcggtttgcgccatcacgttattcaccagcgccacgccctggccgtgcaccgccgcctgcaccaccatggcgctgtggctgaagatcggcccctgctgcacattgatgtgttgcaaccccagctggcgcgtataggccagccagtcacggcgtgaaacgtcatgcagcaacgtatgataagccagatcgtctgcggttttcagcggatgatcgccggtcagcaggctcggcgaacaaaccggcagcagatattccgcatacaggcgctcggcgcgcagccccggccaattgccgcggccgtagaaaatcgccacatcgacgtcgtccgccagcttgtcttcttcgcggtccaccgcctggatgcgcacatcgatccccggataagctgagttaaagccggacaagcgcggcaccagccactgaatggcgaagctcggcggcagactgacggtcaatgcccccttggcgctgcgcgcctgcagcttgcgcgtcgcctcgttgatcgaagagaagatctccttgatatcgaggtagtaactttgcccctcttcggtcagcagcagcgagcggttgcgccgacgaaacagcttcagcccgaggaagtcctccagcgacttgatctggtggctcaccgcggcctgggtcacgaacagctcttccgccgccttggtgaaactcaggtggcgagcggccgcatcgaacacgcgcagcgcattgaggggaggtaagcgtttagacattaaattagctacttttgtgtaacattaatccgaatgattcggcgccgaaaatcgggcggctttgcgtggcaagccatcggtaaacgctaacggcgtattgccattagttttttttatccgagccattataatttgtccgttgaggatgcgccagcaaatacctatagtggcggcacttcccgggccggaacgaaaagggagtgggtgtcgaggacgccgatgaacttttggcttgtggttgtgatgttgtgtttgcaaattgtccggcgattccggacatggtagctaggctactgttttttcacttcctgtacatttaccctgtctgtccatagtgattttatgcagcaccgcaaaacttgcggtgcttttttttgcctgacggttactggttgctttcaaccatctctttcacatcggcgcggttgatctgttgctcgacgccgttggcgtctttatagctgatcatgccggtatcgttatccactttaggcttaccgtcagcgacaatggtgcgtccgtcattggtatgcatcacgtagttgctggaacaggcggccagggtgaacgtaagcatcagggcagagataactgcggctgttttcttcattgaggactcctttgtagttttaaatgctgataaataccttttatgtgtatagatgcgattaataagcgcacgtttaatagcataacaaactttaccaattttgccaggcgataagtcctaatcggcgcgaacgcttgtctccggcggcaaaataggacaggatcacccatcgactcaagccagtgacaatcagggtatgacgccttttaaccccagcctttttcgccaacagtttcccgcgctcgcgcaggacggcatctatctggacagcgccgccaccgcgttgaaaccgcaggcggtgatcgacgccacgcagcagttttatcgcgacgacgccgccaccgtgcaccgcagccagcatcgggcggcgcaggatctgaccgcccgtttcgagcaggcgcgcggccaggtcgcgcaactgatccatgcgccgtcggccgacgacatcgtctggacgcgcggcaccaccgaggcgatcaacctggtggcacagagctacctgcgcccgcgtctgcagccagatgatgaaattctggtgagcgaagcggaacaccacgccaacctgatcccctggctgatggtggcggagcaaaccggcgcgcgggtggtgaaactgccgatcggcgccgatcggttgccggacctggcgcagctgcccgccctgctcaatgacaaaacccgcctgttggcgctggggcaaatgtccaacgtcaccggcggctgcccggatctggcgccggctatcgcgctggcccatgccgccggcgcgcgcgtgatgatcgacggcgcccagggcgtggtgcacggcccggccgacgtacagcggctcgacatcgatttttacgccttctccggccacaagctgtatggcccgaccggcatcggcgcgctgtacggcaaagccgagctgctggcgcagatggcgccgtggcaaggagggggaaagatgctgatccaggcgtcgttcgacggctttaccccgcaaaagccgccgcactgcttcgaggccggcacgccaaacatcgccggcgtgctgggattggccgctgcgctcacctggctcagcgaacaggatatggcggcggcggagcgctacagccgcgagctggcggaccgggcggaacagcggttggcgcagctgccgggctttcgcagcttccgcagttccggttccagcctgctggcgttcgatatcgccggcgtacaccacagcgacatcatcacgctgctggcggagcaaggcattgcgctgcgcgccggccagcactgtgcgcagccgctgatggcggcgttaggcgtcagcggcacgctgcgcgcgtcgttcgctccctacaatactcaacaggacgtcgatacgctggtcagcgcgttaacttacgccctcgatctgctggccgactgacttgactcccggagacgctatgctcgccccccatccttttggccgagagatcacctccgacgcgttgatcgccaccttcagcgcgctgaaacagtgggaagaccgctaccgccagctgattatgctcgcaaaacggctaccgccgctgccggaagccttgcgcagtgaagaaatggcattgagcggttgtgaaaaccgcgtctggctggggcaccagttgctggaagacggcacgctgcacttctatggcgacagcgaaggccgcatcgtgcgcggcctgctggcggtgctgctgaccgaagtggaagggaaaacgccgcaacagatcgccgcattggatccgctggcgttgttcgaccgcctggcattgcgcgcgcagctgagcgccacccgcgccagcggcctggcggcgctggccgccgccgtaaaggcgatcgccgcccgttacgcctgacgcgccgccttcgccaccatctttttcagcgcgtgcgacacggcgacgaagccgaaggtggcggtaaccatggtcgccgcgccgaaacctgcgctgcaatccattcttttcggcccttccgccgtgctgcgcgaagcgcataccgagccgtccggctgcggataaaccagcggctcgctggagaagacgcagtcgatgcccagcttgcccttgccgtttttcaccacgttgaaatcgtgcttcagccgctcgcgcagtttggcggccagcggatcctgaatggtcttcgccagatcggccacttcgattttagtcgggtctatttgcccgccggcgccgccggtagtcaccaccgggatcttgaaacggcggcagtaggacagcagcgccgccttcggccgcacgctgtcgatcgcgtcgatgacgtagctgaagttatggtccagcagctcagcgacgttgtccggagtgatgaaatcatcgatgcaggtcacccggcattccgggttaatcgccaggatacgctccgccatcacctcggttttggattgcccgacatgctgacgcaatgcgtggatttggcgattggtattggtgacgcagacatcatccatgtcgatcagggtgatggcgccgatgccggtgcgcgccagcgcctcagccgcccaggaacccacgccgccgatgccgatcacgcagacgtgtgcctgcgcgaacaccgccagcgcctgctggccgtacaaccgcgccgtgccgccgaaacgctgcagataggcttccgaataagctgtgctcataacgctttaattaccttcgtaatgcaaatgataagggccggaaaatccggcccttgcgggtcaatcttttcacaccgcgcgcgtttaccgggtggccaacaacgaaccgccgccgtttgactgattggcgctgaacagctggccaccgccgttgttcttcagcacccagacgcggccgtagtggttgtagtaccccgccgagtggccggcttccggcccgatgccctgatacatgtcaaaatgctggcccttgatggcgccgcccacgtcgagcgcgaccatcagacgcatctcgtattttcccgtgaatttacccttgttgtccagcagcggcacttcggccagcagcgtggtgcccgccgggatcagcgaacggtcggaagccaccgaggctttggcgatcagcggcaccgcactggcgcctttcaccggcgcaaaagcttccgggcggaagaacacgaacgacgggttctgctccagcagctcacgcacctctgcggcgctgtgggtatccgcccactgacggatcgcctgcatcgacatgtccgccttggccacttcgccgcgatcgatcagcaccttgccgatgctgcgataggcgtggccgttcttgccgccgtagccgaagaacaccagcggctggccgttgccgtagtcgacataaccgctgccctggacttccatcatgaagttgtccatcagcgagttggtgtaagcgatgatatagcgatcgtcgagcgcgccggagtagatgcccgcgcgatccggcaagcggcccctgcccttcggcggcatgcggtacagcggatagcggaactcgccctgttgggtatagcgcgcctgcaccaccggcgtatagtagccggtaaactgcacgttgccgtaattgtcgacgccttccatctggtaagcgctgaggccgtactggctcagcatgcgcgtgtcggcgccggacgccatccagctttgcaccgcctgataggtgctgttgttgcggttaaacagcgaaggcgacgcgtacttgatctccatcagctgatccgagtaatccttggcgttgaccggcgaacctttggcgttgggctgattgaccagctccagcgattgatccagacggccgtccttatattgctgaccccgatcggtcggcttggacgaacagcccgccaacaccgccaccatcaacccgcccagcaggtatttgccccaacgtcctttcatcgcgcacactctcaaactgatatgatctaccggctgaacgataacaaacgctcattgataaaggaatcgctgcaaataaaaaaagccgcacggaggatggtgatgaaaaagaaggcaaattgcgggcaaattcagcagaaaaacgggtttagggcaataaaatgcaaaaagggtttgcaacaaaacgcatggagagtatagtgcgcatccatcggacgcggggtggagcagcctggtagctcgtcgggctcataacccgaaggtcgtcggttcaaatccggcccccgcaaccaaccgatgccgcattggcggtatttttcgtttggtttcgataacaaagtattacacggacgcggggtggagcagcctggtagctcgtcgggctcataacccgaaggtcgtcggttcaaatccggcccccgcaaccaaccgaatgtcgtaccagcggcataacatgaacggtggtttcgtcgtaataccgcatcaagacggacgcggggtggagcagcctggtagctcgtcgggctcataacccgaaggtcgtcggttcaaatccggcccccgcaaccaactcttgatgacaacagataagcaccctgacgggtgtttttttgtatctgcaatccgcgaaaatagccggactcgcgcccggccctgccgttatcgactcgccagcgcgccgccgttggcgaaataagccttgatgcccgccagaatcgactccgccacctgctgctggaagtggctggtgcgcagcttgcgctcctcttcgatgttgctgataaacgccgtttccaccaggatcgacgggatatccggcgccttcaacaccgcaaaaccggcctgatcgacgcgattcttgtgcaaccggttgattttgcccatccggttcaacacttccttgccgaatttcaggctgtcgttgatggtcgcggtctggatcagatcgaacatggtgtggtcgagatagcggtcgccgctcttgctgacgccgccgatttggtccgaggcattctgcgtctgcgccaggaacttggccgccgagctggtggcgcctttggtggacaatgcgaacaccgatgacccgcgcgcagcgcggctggtgaaggcgtcggcgtgaatcgaaacgaacagatcggcgcgctgcttgcgcgccttggcgacgcgcaccttgagcggaataaacacgtcctcattacgcgtcatgaacactttcatgttcggctcgcgcttgatcatggcgctcagcttgcgggcaatctgcagtacgatgtctttctcgcgcgtcttgtacttgccgatcgcgccgggatcttcgccgccgtggccaggatccagcatgatgacgatcggccgatcgcgccccgctttgccggcctgcggcgcttccggcggcagcgtgcgctccagatcgcccttgttgtaatcttccagtaacgccagtagcggatcatattcctcgccgctgccgccgcccttggtcggatagagatccatcaccagacggttgcgatactccggcaccggcgccagcgtgaaaatatgcgggctgacgctttgtttgagctccagcaccagccgcacggtattctgatcgaactggccgacgcgcgcctgcttgagataaggatcgtcggcgcgcacctgcccggcgatgcccttcagcacgctgttgaggtgaacgccttcgatatccaccaccacgcgatcgggattggtcagggcgaactgcttgtatttcagctcgacgttggattccagcgtgacgcgggtataggtggaggatggccagacgcgcacggcgatcacgtgcgatgatgcggcgaagcccgtacgactcacactcagcaaccagctggcggcaacgccctgtaataaacgacggcggcccagattgtgattagcgtttggcatgcggctccggcagtaatagctgtttacaacagatgaaaaaaacaccaatgaaatggggatgctgaaaactttaaccaatcattccacccctgtcatcagaaaatctttttatggtttttcaatttattaacgatttagcgcccttagcgcacgcttcatgacgatttcccacttgccatcggcgcaataaaagaataaaaatacaaaaatatcgtataaatatgcaaagaggtttggccgtgaaggaacgtagtacagagctggtgcaaggattccgtcactcagtcccctatatcaacgcccaccgcggcaagacgttcgtcatcatgctcggcggggaagccatcgaacacgagaatttctccaacatcgtcaacgatatcgggttgctgcatagcctgggcattcgcctggtggtggtttacggcgcgcggccgcagatcgacgccaatctggctcagcataactatgagccgatctaccacaaacacacccgcgtgaccgacgcccatacgctcgaactggtcaagcaggccgccggcctgctgcagctcgacatcaccgctcggctgtcgatgagcctcaacaacacgccgctgcaaggcgcgcatatcaacgtagtcagcggcaacttcatcatcgcgcagccgctgggcgttgatgacggcatcgactactgccacagcggccgcattcgccgcatcgatgaagaagcgatccaccgtcagctcgacagcaacgccatcgtgctgatcggcccggtcgcggtttcggtcaccggcgagagcttcaatctgacttcggaagaagtcgcgactcagctggcgatcaaactgaaagcggaaaaaatgatcggtttctgctcctcgcagggcgtgaccgacgcggaaggcaacatcctttccgagctgttccccaacgacgcgcaaaagcgccttgaagagctggaggaaggcggcgattaccattccggcaccgtgcgcttcctgcgcggcgcggtgaaaggctgccgcagcggcgtgcgccgcagccacctgatcagctatcaggaggacggcgcgctggtgcaagaactgttctcacgcgacggcatcggcacccaaatcgtgatggagagcgccgaacaggtgcgccgggcgacgatcaacgacatcggcggtattctggaactcattcggccgctcgaacagcaaggtattctggtgcgccgttcgcgtgaacagctggagatggagatcgacaaattcaccattatcgaacgcgacaacctgaccatcgcctgtgcggcgctgtacccgttcccggaggaaaaaatcggtgagatggcctgcgtggcggtgcatcccgattaccgcagctcttcgcgcggcgagatgctgctgcagcgggtggaaaatcaggcgcggcagatgggattgaagaagctgttcgtgctgaccacccgcagcatccactggttccaggagcgtggcttcaccccggcagaagtcgacgtgctgccgatgcaaaagcaggcgttgtacaactaccaacgccgttccaaaatcctgctggccgatctgtaatctccgcggcgcggcccttgccgcgccccttcaacgcttattccgttgcctgcagccgttcagccaatccgctgcggcgctgggtcggcatacgaatggcccgcagcagcaccgcctccgtggcatacagcgagagctgcttacgcgcgcgggtgatcgcggtatagaccaattcacgcgtcagcaccggcaggaagtgattcggcaacaccagcaccgtatggtcaaactccgatccctgagatttgtgcaccgtcatggcataggcggtttcatgcgccggcaaacggctcggctgcaccgacttgatgcttccatccggcagttggaaatgcacacgcagctcgccgcgctcatccggcagcgtaatgccgatatccccattgaataaccccagcgcgctgtcgttgcggccgatcatcaccggccgcccccgataccagcggccgagaacgcccggtttgcggtcgatcagaccggcgcgctgcagcccgagttcaatacgttcattcaggccggcaacgccgaaaggcccttcacgcagcgcgcacagcacctggaagcggctaaaggcggccagcaccgccgccgcatccgcaccttcggcagtcagccgcagatagtcgcgatagcccgccacgcaggcatccagcagcgcctgatactcttcgctcgtcgccagcgcatagcccgcgacatctccgaaactgccgcttaaggctgccagcgcgcgctccccggcaccggcgttaaccgccaacgccagttggccgatgccggagcgggcatcgaagcgatagctcttgcgcagcaggcataggctgtcacgcaccgccgcttccgcgtcggcctgccgcccttcgagcgaacagccggtcaggcggcttagctctgcagcacgcgcatcgctgtatccctgctcggcaaaacggcaaatgtcccccagcaccgcgccggcctccaccgaggccagctgatcgcgatcgccgaggaaaatcacccgggcccgatcgggcaacgccgcaatcaggcgcgccatcatcggtagatcgaccatcgaggcctcatccaccaccagcacatccaaatgcagccggttgccgcggtgatagcgcatgcgctgactgttgggttgcgcccccaacaggcggtgcaacgtcgccgcctccgtcgggaacaaggcctgctgcgccggggtcaacgccagctgacggctggcgctgccaagcgactccgtcaagcgcgccgccgccttgccggttggcgccgccagctgaatgcgcaagcgcgcgctttcatccaactgcaccagcgccgccaacagcttggcgacggtggtggttttaccggtgcccggcccgccggaaatgatcgcaatgcgccgcgtggcggctaccgcggcggcgatcttctgccaatcgggttcgtcgctcgccgaaccgaacaagcggtcgagaatagtgcgcagttcagcctccggcaccgccagcgactcgccttcgccgccgataaacgccgccacttcaccttcgttttgccacatgcgctgcagatacaagcgcggcccgcgcagcaccagcggcatagcgctactgccgtccccgaccgcagcgctggccgccaggcgctgctgccaacgctcgctatccggtcgcccggccgcctcccacagcgccagcgccagcgccggttggcgcccttcaaacagcgtatccgcctgcagctgctccagcatcagacagacgtgaccggcccccgcctctgcgctcaggcaggcggcggccagcaaaatatcgggctcgtcttcgttcgccaccacgcgggcgaactgcacgtccagcgggcgcaacacgccaagcgccaccgcctgctccagcagtgcgatcatgatccatcctccgtcgcagcagcctcgccgctgaacaagcgatccatccccgccaccagctcaaactcgggaagacaggtgaaaatgccgttgcccgggtgcgcctcatccacgccgcgcaggaacagataaatcaccccgccgaaatggcgccggtaatcgtaatccggcagccgatgacgcagataacggtgcagcgccagcgtatacagctgatattgcagatcgtaacgatgctccgccatcgcctgctccatcgccggccgggtataggcgctgctgtcttcccctaaccagttggacttgtagtccagcaggtagtatttgccctgccaacagaacaccaggtcgataaagcctttcagcatgccctgcacctgatggaaatccagcgccgggcagcgagcggaaagcggatcgtaacgcctcaccagagcatcgagatccttcgcctgcaacaactgattaatcggcaaatagaactgcaactccgcctgcttgtgctgcggcgttaacgccgccagcgtcacgccgctgccatcgagcggcgtgttgagtagcacctgcatccacgccagcagtatcggttgccagtgttcagcgaacccttgctgttgcagctgttccagcaaccactgttcgtcgagcggctgggtgaagtccaacgtttcgaacaggctgtgcaggaaggtgccgggcgtcgcgccgcgcgggaaggtatgcggtgtgagcgctggctcactctcctcactccgctcccccgcagcgtcgatatccagacgcggcagcagatcctgcatcaggctcgcgccgtgctgctgcaaaccggtatagctggtcacccgccaaaaatcctggatccgccgggtaaagcttttcgccgccagcgcttcggccaacgccgtctggggctgccaaggcgcctcgtccggcgattcaaccagcgacagcgcaatgccgccacccgccaattgctgcaggcgctcctgcagatacacggcgtcgccgggctgcccgccctgcaccagatagcccaatgcgctgcggtgcagatcggtatcgccctgcttcttgcgcgtgccctggaacaacggcgcgatgccgatgctgcagtggtacaccgagcgggtcagcgccacgtacagcagacgcaggtcttccgctaaccgctcctcctccgcccaggcctggctctcttcattggcgtcgaggtccagcaacgcctggaaactgtggcgatcgtgatacagcgcctgctgctgctggcggaagttgccgacgaacggcagccacaccagatcgaactccagccccttggacttgtggatcgtgatcacctgcaccagatgccggtcgctctccagccgcagctgctgattgtcggactggcgattaggctgggcgatctgctgcgccagccagcgcaccagcgcatgctcgctgtcgagctgcgccgccgcttcttgcaacagctcccccagatgcagcacgtcggtcaagcgacgctcgccgccggcgctggccagcaggttctccgccagttggcgcgctttcatcacctcgctcagcatcggcaacacgccgcggcgcagccagagcgtgcggtaattgtcgaattcattaaccagcgcgtcccaggcgcgctcatcgcggctcaggccgtccagcgtcggcgcgtccagccccatcagcccggtggccatggcgctgcgcagcgtacgctcctgccccggcgccaacaccgcctgcagcaaccacagcaggtctttggcctccggggtgtcaaacacgctgtcgcggttggacaggtagaccgacggaatagacagcgcgctgagcgcatcgcgcaccaacgccgcctcattgcggctgcgcaccagcaccgtgatatcagaggcttgtaccggccgtgacgccttgccgctctgcagccgcgccagcccctgctgcccggcgctgagccagtcgcgaatttgcgtggcgcacaggcgcgccatcagctgttggtaatcacttacacccacgccttctccctgctgcagccagaactgcatcgccggctgcggcgtgccgtgcaattcaaacgccagcccttggttcttttccgccgcgttaacctcaataaaggggatttggccgaacaggaaaggtttttctacctgagaaaacaggtgattgacgctggcgaccatcgacggcgacgagcgccagttggtctccagcgtatagtgggcgctcacctctgaacgcgcacgcatgtaggtgaagatgtcggcgccgcggaaggcgtaaatcgcctgcttgggatcgccgatcagcagcaggccgcaatcaggccggccgacgtaaagtttttggaaaatacggtattgctgcggatcggtatcctggaattcatcgatcatcgccaccgggtatcgctggcggatcgcctgcgccagctgttcgccgccgccgctttgcagggcgccgtccagccggctgagcaggtcgtcaaaccccagctcggcgcgctggcgtttttcctgctgaatggaggtgcggatctcgctgagtgcgcgcgccatgatcaggtcgcgcagcgtcaagggttcatcgaacagttcgtctatcgccgtgaacagcgcatgccgcggcggctcgcccttcttggtcttctccagcagcaccgactggcgaaatttatccagttccttcggcagctggtagtcctgagtctcctgcccgctccattcgccgaccttgttcagccagttcggcaggtgtttactgctgtagctgcgcttatcgacgccggactgggcgattaacgcctcaagatcgcccgccgccgcccgccattgcgccttgatggcgtcgatgcgcgcgacgatctgctcgtggcgcatcaggagggtttcttcgtccttcggcggccgacgcagcgccggcgcttcaccgtgcagatagccggagagatcggccagcaacgcttccgggccgctccactcctggctgaccgcacgcgccacgcccagcggcaacggatagcagtggcgacgccaaaagtcggcacaggcctgccgccgcagcggcagctcgtcctgcaccagcgtttgttcaaacaacatgccggactcgaaggcgttgtgcgtcagcatccgttggcaaaagccgtgaatggtgtagatcgccgcttcgtccatttgccgctccgccgccagcagctgcgcagcggcgtcagacaaatcgtcaatttcttccatcagcgccgaaaacagcagatttttgcattccgcgtctttaccgcgcacgcaggcgatgcgcagcccgtggatattgtcacggatacgcccgcgcagctcctcggtggcggcctcggtaaaggtcaccaccaggatctcttcgaccgtcaacgggcggggaaacgccgcttccccccccaaccccagcagcaagcgcaggtacagcgcgccgatggtaaaagttttgccggtgcccgccgacgcctcgatcaggcgttcgccaaacagcggcaacgtcagcggttctagcctctgcggggcgacttccgtcatggcgtcgccactttgcgcggcaggatctgctgcaatgccgacgcgttcggataggtgacccaatccttaggcgccgcgtaatccgccttgtcttgcccgctgccgctaacctgcgacagcaccgccagcccctgtggctggatcaccgcctggtggaaataatccgccagtttggccggcgtcagctgttgcacctgcgcgatcagtttctgacgagtatcgaaggcgaagttgccgcgatcgaaatcgttggcgaaccggctggcctcttcgctcagagtttgcggccgctgtttcagctcattgatgagcgcctgtttgtactgttcaaagtccgcctcgctcatgtcgcgcaggcgtttctcggttttcgggtagaaatcctgatagcgctggtacaggtaggccggctgtttgctgttgctctgcaacaggaagcccacgccccactggcgccccaccgacatcgggaaagcgaagaccgcgtaccccaattgctcctgcgtgcgcagctggctgtaaaaccacggctgaataatctgccccagcagcgaactgtaggccatgccggtcacttcgtcgtagccggtcggcacataaaccgccgccagcgccgagtcagtgctgctgcccacctgttgcaggttggccagatgatccttgtccaccaccacgtcttcgccgtgccaccattcgctcccggtacagcccagacgatgtttcagcgtcgacgccaacgtgtcgacctgctgcttgctcatgttgcccactaccagcagctccggcgtggcctcggccagcaggctgtcgcgataggccagcacgtctttcagcgttaacgtcttcagcacttcgcggcgctcgctgcgttcggaatacggcacgcgggaaaccatctgcaccggctgaatggccagctcaaacgccttgcccttctcggcggcgtccagttgctccagataccaggacttggcctgcgccagctgatcttccgtcggcgtgaagctggaatagccctcgatcagcgccgtcagcaactgcggcagacgctgggtgaaaccgttggcgttaaacatcaggccgttgttcggcgaggtcgagaagctcagcccaccgaccgatgcctgatagctcagctgatccagcgccaggccggccagataatccgtcagcgagaacagcacctgattgcgcgcggaatccatggttttggcgttgcggaaagcgacggtgacgtcggccttcggctcgtcggcgaagtaacgactcggcatgtacaacacgcgcaggccgggtttatccaccaccatttccggtttcttgaactcgtgcgatggcttggtcagggtaaagtcatccgggatgtacgggttgagcgccggcagcgacagggaaatgccgctctccaactgctgccactgcgtaaagcgctgcggcgtgattttgtcgacctggtaaggcgcgttaacgaaataggccgtcttgttgtgcggttcatccgggctgacgaaccagatgcgcgcgttttgcggcgtcatggcgtccaggcgttcggcgatcgcctttggatcataacggtcggccaggtaaggcgcgtccagcgcatgctcaaccggcacgcgcagcatggtgtccaccagccattcgatgtagtccatgtcgcgcgtgatcgagggatagcggaagtccaggttcagaacatgcgagatttcatcgaagtagctctgcttgatgccctcgctgcgcagcattttcaggtagttgaaaatggcggcgacgacctcatcgcgctgggccaggcctttgtcagtcagcgagacgctgatggcgaagacgccgccgttgcgatccaccatcggatcggcgccggcattgatggcgtccgccaacccttgcttctgcagccagtcagacagggtgtttttgctgcggttgccgatcaggtagctgatgtaggtatcggttttgctgcgaaacgcggcgctgttgttatcgatgcggaactcgaccttcagctgcttgcgcggctgcgccggcacatagtgaatgatgatgccctgctgttccggcgtgacggccggcacggtgatcggcggcacgctggcgtcatgattcggcacgcggccaaaggttttcgccgcaatgccagccaactgcggcagcgactgattaccgtacaaaacgcccatcatcagattggcggaatagtaacgcttatagaagccggtcagttcatcatgcaacttgctgtccggcttgtctttcagcgtatcgagattgccgccggagaagcgcgcgctcgggtgcgccgggttcagggtttccgcgccgacctgcgccatgcgcatgccgtcgcgcgaacgcgccatcgttaactcggcgttcaccgcgttacgctcgcgatcggcattgcccggatccagcagcggctcggcaatggcgtcggccatgcggtcgaccgccggctccagcgcgtcattttccacttccagatagaaggcggtgcgataagaggccgtgctggcgttgtggctgccgccgtgctttttcaggaattcggacaggttttccggctctggatagcgtttggagcccatcagcaccatatgttccagatagtgcgccaatcccagttggctgttcggatcttcgagcgatccaaccggcaatgccagcgccgccagcgatttcggcgcctgggcatcggacaccagcagcaccgtcatgccgttagccaacttgatcgcctcgtactgacgcggatcgtgctcgctcttgttgatcttctccgccagcggttgccatccttgtgcggcccaactcaacggcgcccaacacatagccaataataccagcccggtgatgcgggccaactgtctgcgcatatccaaaataaacccctattctgacatcgccacgcccactccctgacgctggcgacgtacatcaaaaccacataaccaaatctgtactcgccggattcttcgccaatgtggcgccccaaaacgcggcgggtatatgcctgtacgttatgtaagaccgggaatcaccccaatggttgaatataaccttcgttatttttaccacctcccgccgcacagcaccaccgggggattgttaccccaggttatgacgcgccaccggcagcagataacgctctgtttcggccagtatttgcgctaagtattcattatccaattggcggaacactcgctgaacgtagggatcttccccttctccgggaatgcgctgatcgccctgccaggcctgcagcaatttggcgcgagcctttgtttgcgcttcttcctcccagtcgatttgctgtgtttccggctgatagcactgactcagccacgcccagccgctcttgttcagcaacaacagcggctgacacagaccgcgctgataacccgccagcagctccgccaactgcgcctgcgcctcttcaggcgccagcgcggcaaagcgccaggcggagttcttgcggccgtagatgcggctctcgccggtgccgccggcgcggcagtacaccaggtgctccagccacagcaatatgccatccaccgccgacaacgtggcgggccgccagcgcaacaggccgtcatcctgcacctgatgcagccagccgctgagacgtacgccggcaatatcgatatccaattccaggctatggctctctgcgcgttccgcacgcacctgctcggccagttcgctcatctcttcctgctgcttttgccaatagatctcgccaaaggcgccatagggcaagccgccggcggcacgcacccgctggaacaaccgttcgggatcgtcgccgtcgatcagggtattcagcagttggctgttgaactggtagcggctgaggttatccagcgtgaagggctcttcgtccggcagctcagtctcttccaggataaaactgacgcccaaccgcaattggaaaaacgcgcgaatcggatggcggtaaaaccgcagcagctcatccaatgatatttgctgcagcgcttcggcaggcagcggctggttgaacgccggatgcgccgcaccgcgaccatctgcggcgggcagccactcggcggcatagctttgcgcctccgagcccggcaagaaattctcggcggcgaacggcatgcgcgcatgccacttcagcaagtgctcaccaacccgccgggcgctgtcgtctgcgctgagttcctcatctcccggcaggcaatagctttgctccaggtactcaagcagctcagtgaccagcacagaagggtagcgcgggctgttgtcctgaatggaacggccgatgaagctgatatatagccgctgctgagcggacagaatcgcttccaggaacagatatcggtcgtcatcgcggcggctgcggtcgccgcgcttgacctgctgcgccatcagatcaaagcccagcggcggcagcgtgcgcggatacacgccgtcgttcatgcccagcaggcacaccaccttgaacggaatcgagcgcatcggcatcagcgtacagaagttgatttgcccggcgaggaagcgctggctgatgcgctcctgatcgaggcgcgccgccagatcgtcgcgcagaatggtcaacggcacctcatcgggatagcgcgccgccaagccaaaattaatggcctgctgccactgctgctcaatcaatgccagcaccacttcggtatcgctgtccgctgcgaagaaggcatccagcagttggcggcacagcggcagccacgcctcgagcgggcgcgcttcgctcaagatttgccgccagtggctgagctgcgccagcaggtctgccagttgccccgccagttcggcgaccaacccgctcgattcatcgtaaggcaaaatgccctgccaatcgccggcgttgctgtccatcgcgtaaccgagcagcatgcgcgtaatgccgaatcgccaggtgtgctggccggtggcgggcagatccagttcgcgcacgttatcgtcgtccagaccccagcgcacgccggattcaccgacccagtgacgcaacaggcgcaacccctcttcgccaatggcgaaacgggcggccagggcaggtacttccagcagcgccagcacctgttccgacgtaaagcggctttgcggcaaatcgagcagggagatgaacgcctgcaaagccggatgcgcctggcgcgctttacggtcagaaatggcaaacggcaggtagcgctcggcgggggcattgccgaacaccgcctgaatgtaaggcgtgtagctgtcgatatccgccaccatcacgatgatgtcgcgcggcgtcaacgcgggatcctgcgcaagcatggtcagcagttgatcgtgcagcacctccacttcccgctgtgggctgtggcaggcgtgcaggctgagggagcggtcgttttcatcaagcggacgtttgctgaagctgctttccagcgtttccgcggtaataccgattaccgcatggtcttccagttccagcatatcgcgctgaacggcgtgcagcatggtatcggccgggatatcgacaaaggcgtcgacctcttgcgccccttccatctgcgacagcaggtaaaggtgatcgcgccccagcttgccccaggaggccagcagcgggttgctgagttgctgctgcccttcggcgtcaaacaggcgcgccgcgtcatccggctcgcggaacagcccttgctcgcgcgcctgatgatagtgacgacgcttgcggctctgcaagcgggccagaaaggcgtaatcctgaatatcaccccaatagtagcgacaggggttggtgaacatcaggtggatgtcgatatgccgccccagcgcctgcagcgcttccagatagatcggcggcaatgccgagatgccgcagataaacacccgcggcggcaaaccgggcgggcacgtttttgcctgctccagcgcgtggataaagcggctgtacagattggcgcggtgccattccggctgccccaattcgcgcgtgtattccaccagtcgcgcccagagcggcgcctgccattgctgagcctccgccagaccgtcgatgcgctcgccgcgctgccagctctccagccactgcgggcgataaaccaaatattggtcgaacaggtcggcgacccggccagccaactggtggattttgcgcttgtcgccgtcatcggtcagatagtgctgcagtggcgcaaacgccggctgagtcaacatctccggtaacaaccacatcagcttccaggtcatggcctccttgctgaaggcgctctctttcggaatatccggcaacacccgggtgaacatgtcccaaatgaaggtcgccggcagcggaaacgcgacattggcggcgataccgaactgttccgccagctgcatctgcagccattgcgccataccggggctttgcaccagcaccacctcctgttgaaaaggatcggtcaacggatctctggctatcagcgcgctggtcagcgttttcaacaaatccagctgattggaatgataaaccgtgaacatgaagactcctttaaaacaagatacgtaccggctcaaaaacgggtgcaataccagcggctcagcgtcgcccactgccgttgcggagtttgtactctgaccgtcaatcggcggcaatccgcatccgcgccgtcgaacgccgtctcgcgtcgccagccttccggcagcggttcggcatcgagccgaccggtgactgcgaacgcctccaactgctgatgcgccatcacccaggcttgccggtagtgccactggcgctggaacgactgcaacagcacctgatgatactgtaacaagcccagcagcgacaccgagaacaacaatgccgccaccaacacttccggcaggctgaagccgttgcgggataaccgccctgcgcgagcgttaaccctcacagtcggccggccttttctcggggcaaaaatccagccggccgcccggctgcgcttgcaccctgccgaccgattccgcaccgtcaaacgcgccccattgatacagccaaagcggctcaccgccgcgcatctccccaaggccgcgtaccgtcacgacgcccgctctggcagacagccgggcgcaggccgtcagttccgcgcgctgcctgcataaccaggccgccgcactcagctcggcgcgcggccaacgctggagcatgccccaactcagcgccgatgcggcctgattgtaagcctggaggtagcgctgctgatcggcggccagtaacagcgcgttatccaattgccggtgctgggcattgagcaacatcaaccccaacgccagcagcaacattaccgccgccaaagtactgccacctcgctggctccgccggttcatggcaacgccgccatttcgacgctcccgctcaggctgcgcctgatacgcgcatcgccgacagagcgccccgccagagtcaaacgggccagcgcaccgccatactccccgcgctctatcgccacatgaaaccgctcaatgcgcacttcgtcacgatcgagcagccgctcccagccgccgccgtcgcattggcttacgccgcgctgcccttccaagccgccattgcgcagccgatagccgaaataacctgcatcctcgcccgaggtgagccattgcccactgcgggtgatatcgtaagcgacgataacgcagctgcccgccgcttctcccaccgcctggccgatcagcagcgggcggccggcgcactgcccggcacagaaaccggcgcggcgcaggtctttctcgatgccgaacgccagttgccgcagcgttgactccagccgaaaatgctggccgacggccacgttttgctggcgcaacagcgggtaggttttcgcggcgccgagcgcgatcacgctgccgaacaccagcgccaacatcacctccggcaaggtaaaaccgcgttctacagtcagcatggcgcgatcccccttatccggagcccttcgctgcacaaacgcagccgccctcgggcggacagcactagccgcaggccgcctgcctcgttgctgagcaggatgtgccccgcctgcgcggtattgcgcaagccgtaaaacccgatctctttgtcggtgtagccgctcaaaacgacgtcgcggtaagacggtgagaaaacggaaccctcggcggaagcgcaatccggcggcggcacaccgccgcccaggcaccagggcgtgccgttcttgaaccacagcagcgtcgtgcggttgcgccagttggcgtccgcctgcagtcgcagtaaaaacgccagcagctgctgggcagtatgttccaggcgcaacgtttgctgatggtggcgccattgaccgacgccccagccggtgagcatgccggcgatcagtagcgccgccaacagctcaatcagcgtcatgccacgctggcggtgatcgatgttcgagagcgtattttcattcatgcggccagtttaagggccgtaacatggcggtaaagccgcatgcgcaagccttgcggcaaactgcgcaatgttttccctgtagcgacaaatggcgacaataaaatgcggcgcggcgcgcaatgcggataaaaaaaggggcgcaatcgctgcgcccctggtgtgatgcggttaaggtcagatcgcgaccggcgccttgatggccgggtgcggatcgtaaccttcgatctcgaagtcttcgaaacggtaatcgaacagcgaagccggcttgcgtttgatcaccagcttcggcaacggacggggttcacgcgtcagctgcagcttcgtctgttccatatgattgctgtacagatgggtatcgccaccggtccagacgaagtcgccgacgtccaaatcgcactgctgcgccatcatatgcaccaacagcgcgtagctggcgatgttgaacggcaggccgaggaagacgtcgcaggaacgctggtacagctggcaagagagcttgccgtccgccacgtagaactggaagaacgcgtggcacggcgccagcgccatctggtccagctcaccgacgttccaggcggaaacgatgatgcggcgcgaatccggatcttgtttcagctgctggagcacgttgctcagctgatcgatctgacgaccgtccgccgcgccccaggcgcgccactgcttgccgtacaccgggccgagatcgccgttttcatcggcccactcgtcccaaatggtgaccttgttgtcacgcagataggcgatgttggtatcgccgttcaggaaccacaacagctcatgaatgatcgaacgcagatgacatttcttggtggtcaccaacgggaaaccttcctgcaagttgaaacgcatctggtggccgaaaatcgacaatgtgccagtgccggtacggtcggctttaggggtgccctcggcgagcaccttgttcatcaaatccagatactgtttcatttgtccctcacgacagttgttgctgcgggcgacgacggtacgcccaaatcatcataataacaccggccaccaccatcgggatggacaggatctgccccatgctgatcacgccgtcgaacaggccaagctgggcatccggctggcggaacgcttcaacgatgatgcggaatgcgccataaccgatcaggaacaggcccgatacggcacccatcggccgcggcttgcggatgaacaggttcagaatgataaacagcaccacgccttcaagcagcagttcatacagctgggacgggtgacgcggcagcacgccgtactgattcagcagcggcagcagagaagggtcggcggcggcgagcgccacgtcttcgctgcgcgagcttgggaacagcatcgcccaaggggtgtcggtggtcacgcggccccacagttcaccgttgatgaagttgccgaggcggccggcgcccaaaccgaacgggatcaatggcgcgataaaatcggaaacctggaagaaggtgcgtttggtgcggcgagcgaaccagaacatcaccagaatcacccccatcaatccgccgtggaacgacatgccgccatcccagactttaaacagatagagcggattatccaggaacagcggcaggttgtagaacagcacatagcccacgcggccaccgacgaatacgcccaggaaaccggcgtagagcaggttttccacttcgtccttggtccagccgctgcccggcttgttggcgcggcgcaccgccagccacatggcaaaaacgaagccgaccagatacatcaggccgtaccaatgcaaagaaaccgggccaatggagaaaatgaccggatcaaatttaggaaacgccagatagctattgctcatctatcaccacaacatgtctgttatttttccccatgcgggggcgggcaggtgccaaacgtcggcgcaggttgtcacacgcctttcaaacggcagcgttgaccgctgcggtttgcaagacgacgaacatgcgtcgcgctgaggttgcgcatcataacataggcttagcgcggtccgggccggcagcgcgggaaaagttctgtaaaaaaatcacatcgcgcggcgattatctgccgccgcgaatcaacccgcccatgccgcgtcgttccataaacgccgccaccagatggcgcacttcggtggtcatttgggtgttcaacacccggtgcgccaacacttccgcgtcggcaaggtcgatatgccgcagcaggtatttgatgcgcgccacgctgcggccgttcatgctcagattgcgatagcccatgcccaccagcaacagcgcgcccatgggatcgccggccaactcaccgcacaggctaagctgcagcccggctgctttcccctgctcggcgatcagcttcagcacctgcagcatcgcgggatgcaggctgtcgtacagcgaggctacccgcgtgttgttgcgatccaccgccagcaggtactgggtcaaatcgttggtgccgaccgagatgaagtcgacgcgcccggccaaatgcgggatcaggaaaatcatcgacggcacttccagcatcacgccgattttcggtttcgggatcgcgtagccaagcacctcttccacctcgcgcccggcgcggtcaatcaagcgcttggcctcatcgacctcttccaggctggtgaccatcggcagcaaaatgcccaggttgccggtgccggcattggcgcgcagcatagcgcgcacctgtatcaaaaagatctccggctgatccagagtgatgcggatgccgcgccaccccaggcaagggttttcttcgctgatcggcatatagggcagttgcttgtcggcgccgatatccagggtgcgcagcgtaaccggcttgctcggatagagctgcagcatgccttgatactgcgcgacctgttcttcttcggacgggaaaccgctttgcaacatgaacgggatttcggtgcggtacaaccccacgccatccactcggccgcccaacagctgttcatgttccgggctgaggccggcgttcagcatcacctgaacgcgttcgccgcttttcaactgcgccggctgctcgacgtcgtcttccgccagcttgctcaactccagctcttcgctgatcagccgttggtattcctgcaccaacaccggctcaggatcgaccagcagttcaccgcgataaccgtcgacgatcagcaaccgctggctgagcagagaaggctggatgtcggcgcccatcaccgtcggcacgcccatcgcacgcaccaaaatcgccgcatgcgagttggcggcgccgtcgcgcaccaccacgccgaccaggcgatcctgcggcacttcggccagcaatgtcgcggtcagctcatctgccaccagcacaaaacgcgccggccactgggtggcgccctgggtggtgtcgtcgaggtggaacagcaggcgttggcccagcgcgcgcaggtcgctgccgcgctcgcgcatataggtgtcctgcagtttggcgaactgttcggcaaaggcttctatcacctgcttcaccgcccactccgccaccgaaccgttgtcgatttcggcgaacagttcgcgcttgaggcgagcgtcgtttaacaggtgagaataaagatcgaagatcgccgcgctctctttttgcgagctggcggcaaaacgcttgctgaaacggcgaaactccgcgccggcctcttccagcgccagcgtcaggcgctcgcgctcgctggcggtgtccagcgtcgacgcgcggtaaacctgatcgagcgaaggctggctgctgtcctgccacccttccgccaccgccacgccgggcgaggccgccagcgcgcgcacgcgcgtttggcgatactgaccgaaaatggcgttgagctgcgactgtgacaggatcccggccatctgcgtggccagggtgaccatgaaagactcttcgctttcatcgaactggcgcagctcgcgctgctgcaccaccagcacccccagcagttggcgccgatgaatgatcggcaccccgaggaaggatcggaaacgatcctctttcacctgcggaacgtatttaaaactggggtggctttgggcatcggccaggttgataggctcggctcggcggccgaccaacccgacgacgccctcgtcaaacgccaatgcgatagtgcgcccacgcggctttttcagcccgcgcgtggccatcaggtagtaacagcggcgatcgttgtccgccaggtagatggaacacacttcggtgtccatcgccagacaggtttcattgaccagcagatccagcgcatccgtcagactggccgccgcggccaccttctctacaatttctcgcaagcgcgtgagcatagtcggcttaacttaacctctctttcggcgataagcgggggcctgccgcggcgccgcctgctcttgcatcggcatcacggtcacggcgaattctttcatcacccggcggtagacgtcgcgtttgaacgacaccacctggcgcaccggataccagaagctcacccagcgccaaccgtcgaactccggcgtgctgctgcgctgcatattgatatcagcgtcattgcacagtagctgcaacaaaaaccatttttgcttttggccgatacaaaccggctttgtgtcccaacgcaccaaacgtttcggcaatttatagcgcaaccagttgcgggtcgaagccaggatgcgcacatcctttttactcagccccacttcttcgaacagctcacggtacatcgcctgctccgcagtttcgccagggttaatcccaccttggggaaactgccaggagtgctgaccgtaacggcgggcccataggacctgcccctgacgattacagattacgataccaacattcgggcggtagccatcatcatcgatcaccggactacctcgataagcttaaattcgcatagatgtcctgattgtttcacacaagctacaggcggtaaaccactgctttacggcgctgcgggccggataacattgggataactcacagatataggcaaagttataaacataccctagcctttcagaccggttttattcactttttctgtggataggtgtgtgcagaactcgagggataagccggtaaaactctcgtcccctaaaatcccccctcatacctaaaaacaaatattaaacttaaaaacatacagttaaccaatatcccacagtgatttacagggcaaaaatgtgatctatgcacggtaaggatcttaccctggcgaaagatccaccaacgccgtttttatccacagattatccgggcaagttacgcacaaaacggacaaattcgtaaaaatccgcctgagtcaaggctgtaaattgaaccagtgatcggtaaaaatttgggttatcccataaatctgtggataaataggtgtaagatcctgtttattgtcggtggcttcaggtgaacaagccccgcaagtgcattgtcgcccgcgcaaggaaagaaaaaaagtcatgtaaaatcatgctactattattcttttccccaggcgactggggttagcgtttcccgcgtatctatgcagtacgtttttcaaccaaattcaacaggcttgatttatggcgtttttatcccctctgccgcccccgccggaaaatgaacggcagctgttcgagcgcgctcaggcgctggccggcttcagttttggcgaactggccgcccgcgcgcagttgccgatccccaaggatctgaaacgcgataaaggctgggtgggcatgctgctggagctgtacctcggcgccatggccggcagtaaaccggaacaggattttcctgagctgggcattgagctgaaaaccattcctgtcgacgccgccggcaaaccactggagaccactttcgtctgcgtcgccccgctcaccggcaacagcggcgtcacctgggccagcagccacgttcgccacaagctggcgcgcgtgttgtggataccggtagagggcgaacggcaaatccctctggcgcagcgccgcgtcggttcgccgctgctgtggagcccgagccttgctgaagaagagatgctgcgccgcgattgggaagagctgatggatctgattgtgctcggtcacgtagaacgcatcaccgcacgccacggcgaagtgctgcaactgcgccccaaagcggccaacaacaaggcgctcaccgaagccatcggcgaacaggggcaacctatcatgacgctgccgcgcggtttctatctgaaaaagggttttaccggcgcgctgctggcaagacatttctcaatctaagcgatttcgtttaactctggtttagctagccctgtcagcgccacgataaacgcgtataattcacgctttgcatttattaagtattaaggtgtgtcgggcaatgttcgaatggattatggatcccaatgcctggttagcgttaggtacgctaaccattcttgagatcgtactgggtattgataacatcatttttctgtcgctggtggtggcgaagctgcccaaagcgcaacagaacaaagctcgccgaatgggcttggccgccgccatgctgatgcgcctggcgctgctggcctccatcgcctgggtgatccgcttgacgcacccgctgttcaccgtgctggatcacgccatttccgcccgcgatctgatcctgctgctggggggactgttcctgatctggaaagccagcaaagagatccacgaaaccatcgaagggtcggaagaagagcaccacaccaaggtgcacagcttcttcggcgcgatcgtacagatcatgctgttggatatcatcttcagtctggattcggtgattaccgccgtgggcctttccgatcacctgttcatcatgatggcggcggtggtgattgccgtcggcgtgatgatgttcgccgcccggccgatcggcgaattcgtcaatcgccatccgtcggtgaaaatgctggcgctggcgttcctgatcctggtgggcttcacgctgatgctggaaagcttccaggtgcacgtgccgaaaggctacatctacttcgccatgttcttctccatgtcggtagaagcgctcaatctgatgcgcagcaagaaaaatcgttcgccggaataaccctgcgcggaggccgccatcggcggcttccgccgtttcgttgccccctcatttcagtttttcttatcagataaagacttatctgagacgtccccggccaagagtttgctaatcttgaaagaatattgtttttgcataatcgaggatccgcaggatgaaaaagtgggtaatggcagtgtctgcgctggtgatggcggccggtttggcgggatgttccagcgactacgtcatggcgaccaaagacgggaacatgatcctgacgcaaggcaaaccagagatcgacgaagacaccggactcatcagttataaagacgagaaaggcaaccaccgccagatcaacggcgatcaggtttcccaggttatcgaacgctaatcaccgctcgccggctatcgcccgttcaagcgcggtagccctcattcgtctccgcactgaatccgcttcccccatcttcaccgcttggttatagtcaggaaaggcgacatcgccgcccgacggactttgcgccgtcttctgaattgggctcctgtttcaccgggccgcgcggcccgtcagcgctaacaagaaaggaaggccgttaatgcaataccaccgtattccccacagttctttagaagtgagcgtgctgggactgggcaccatgacctttggcgaacagaacagcgaagccgacgcccatgcgcaactggactatgcattggccgcaggcgtgaacctgatagacaccgccgaactgtacccggtgccgcctcgcccggaaacccagggcctgaccgagagctatatcggcagttggatcaaggcgcgcggcaatcgcgaaaaaatcgtcctggccagcaaagtttcgggcccggtacgcggcaccgacagcagcatccgtccgcagcaggcgctggatcgcaaaaacatccgcgccgcgctcgacgccagcctcaagcggctgaacaccgattatctcgatctttatcaattgcactggccgcagcgtgctaccaactgctttggcaaactcaactatcaatacactgaggacaaagctacggtcacgctgttggaaacgctggaagcgctgaccgagcaggtgcgcgccggcaagatccgctatatcggggtttccaatgaaacgccctggggcgtgatgcgctacctgcagctggcggagaaacatgagctgccgcgcatcgtgtcgattcaaaatccgtacagcctgctgaaccgcagctttgagattggcctggccgagatcagccagcacgaaggggtggaactgctggcctattccagcctggcgttcggcaccctgagcggtaaatacctcaacggcgcaaaaccggccggcgcgcgcaatacgctgttcacccgtttcaaccgttattcagggcagcaaacccagttggcgatcgccgaatacgtggcgctggccaaaaaacacgggctggatccttcgcagatggccttggccttcgtgcgtcagcagccgttcgtcgccagcactctgctgggcgccacctcggtggatcagttgaaaatcaacctcgacagcctcgacgtgattctggatgaggacgtgctgcaggcgctcgaagaaatccacacccggtttaccattccggcgccttgatagcctgagggcgcagcctggctgcgccccgtttcaccgccgctgagaccaccacaatgcgctaatcgccagcgcaaacactacgccaaaccctacgccgacgcccaccaccggcacgcccagcttcacgaccaaagaatacaggcccagcatcagcaacatggcggcgttttcacccaggttttgcactgcgatcgcattgccggcgccgaccgaatgtttgccccgctcctgcagcaacgcattgagcggcacgacgaagaagccccccagcatgccgatgagcgccagcaagacgtaggcattgagcatggtcgtttgcagcgcaaacaccgcgaccgcgatgccgataaggatcccggccggcatgcagcgtttcaccgtcttcagcgtgacgaagcgcgcggcggcacccgcgcccaacacgatgccgacggccaccatggcgttcagcagcgtcggcgtggcgttatcggcgatgccaagcgccaccggcacccacagcaccaacagaaaacgcagcgtcacgccggccccccaaaacaggctggtgccaatcaatgagaaacgcgtctgcccatcgcgccataatgtgacgcaggcggtaaagaaactgttcgtcatggcccgcggccgccatgaagcccctgggcgcgccgccgccagacgtggaatatacaggttggcgaccaccgcccccgcgtaaaccaacgcgcaggccgccagcgccgcgaccacgtgccagtccgccagaataccgccggccaccgaaccgatcagaatggcggcgatggtcgaggcctccatcaggccgttagccttgaccagcttctcgccgctggtgatctcgcccagaatgccgtatttggccggagaatacgcggcggcccccacgccgaccaggctgtaacccagaaacgggttccccccaaaacagatcaccaatgcccccgccagcttcagcgcgttggcgaacatcatcacccgccctttggcgaagctgtcggccacctggccgacaaacggtgccaggatgatgtaggtggcgacgaaggccatctgcaggatcggctggctccagtccggatacagctgctgcttgatcagcgccagcgtggcgaacagcaacgcattgtcgccgaacgccgagaggaactgcgcgctgatcaccgcgatcatgccgcgtgacaacaaaggggattcggtcgaaggattcatcaggcactctccggctgttcggccatatgacgcaaggtgacgaaatcaggtttgccgctgccgagcaccggcagcgttttcaacaggcgaatatcgcgcggcaccgccagctccgggctgcccagctcgcgcgccacccgcagcaatgcctcgcgggtaatggcgggatcggtggtgaacagcaccagtgcctcgcctttgctgctgtcgcttttgaccgtggcggcatgcagtttttccggcgacagccgttgcgccagcagttcgacgctctccagcgacaccatctcgcccgccagcttggcgaagcgcttcacgcgtccgcgaatggtgcagtaaccctgctcatccaggctgacgatatcgccggtatcataccaacccggctgcagcacaccgttcgcatcttccgccgccggcggttccagctcaccgggacgttcaacccgcaggtagcctttcatgatattcggccccttcagctgcaggcggccgccgttatcgatgcccggcaccgcgatcaaacgcgcctccatctgcggcatgatacggccaacggtgcccaccttggtcgccagcggcacgttgatcgacaccaccggcgcgcactcggtcacgccatagccttccagaatgcggatgccgtatttatcctgatagatctgtttggtgctgtccgccagtttctccgcgccggccaccacatagcgcaagcgggcgaaatcatacggatgcgcgaagcgcgcatagttgttgaggaaggtcgccgtgccgaacagtaccgtgcagttacggtcatacaccaactccggcaccacgcgatagtgcagcgggctggggtagaggaaaatgcggctgccggtgagaagcggcgtcagcagccccaccgtcaggccgaacgagtggaacagcggcagtgacgacatgaagcggtcgcgcggcgtgaaatcggcgatggtgcggatttgttctacgttggccagcaggctggcatgcgaatgcaccacgcccttgggctggccttcggagccggaagtgaacaagatcagcgccgcgtcctccgggcgttgcggcaacatcgcgcgctgcggttgcagcaagtgccgcaggatccacagcttgtccgccagcgtaacggtgtctttcagatcctccagatacacccagttggcctgcgtcacctgctccggcagatgggtcagcttgcccttctccaggaactggcgcgaggtgacgatggtcttgatgccggcggcggtcatcgcgctgttcaggccgttggcgccggcggtgtagttgagcatcgccggaatgcggttgcgcagcgaagcgccgaagatcgccgccgcggtgatggtggcgttgggcaacagcagcccgacgtgctccccttcggcggtaaagcgctgcagaatgcggctgacgcccagcgatttcttgatcagcgtttggtagctgtcctctttgaaagcgatgtcttcgatacagggcttgcggtgcccatagcgctgctgcgccgccagcaaggcatggaacagcgtctgcggttcgcgcgtctccatgcgcgcccgcatcatgatctgcatcagccgatcgcccgccagcgcccgccgctcgcgcgcacgcggagcctccggcatcggcagcgtggtcggcggcaagatgcggatgctgatttgcggaaaccagcggatcttgaacaccccggccatgcggccgaacgggctgaattcggggccgtcgatccgcaccggcaccacggtggcgcccgatttggcggcgataaacgccgcgccgtcgtagattttcatcagcgcgccggttacggtgatgcgcccttcagggaacaccacgatcggccgcccctgttcgaccatgcgcaccagctgcttgatggccatcggcttggtgggatcgagcgagacgaaatcgatgtaaggccgcagccagcgcataaaccagctctcgccgatgctggcatagaccgcaaacaccggttttatcggcaggaacagcgccagcagtacgccgtcgaggaaagagacgtggttcggcgtaatcagtaatttttgccgttcgaagtgctggacgtccccttcgacccgtacccgaaacaacaggcgaaacagcacgcgcagcagtgaaaagatcatgcccttctcccttggccatggaggcgtaaatcgttgtagggaaaagaatactatatggcaggcaaaaaaaaacctacgcatccgcgtaggttggtgcaattgaaaatggcttcaacatacagagtatgctgatttctcaccaatcaatacctctgggatcacctactctagagagatggcatgcaggaaactaccgccgaatcgcaagagttctgctccaaatgcaaccagctgtaaatttcccgcgatctgctgtaataactcaatgaaacttaaaccttcccgcagcgacgaaaaaataaatataacaacgacgagccagtgacccagacgtgaaatcttcactcatcgcgcgctgacctcgaccaggcagctcatggcgttcggcccctgcgtcagcggcgaggtgccgatatccagcgtcagcacgttcgggttgcccgcctgctcgaccggccggcgctgcgcgtcgaaacccggctcgaaccaggcaccggtcgccatcaacaccacgccgcgcgtcacgccatcggtgagcgatacccccgccagacagctgccgcgcgcattgctgaccagcacttcggcgccgtccgccacgccgcgcggcgccgcatcgtccggatgcatatacagggtttcgcgcccggcggtcttgttgccctgcgccagcggcgccggatccatctggctatgcaggcgatcgctcggctgaatggagatcaggtgcagcggccagtttttggcctgcggcgcacccagccactccaccggcggccgccactgcggatgcggagcgaaatcttcgtagcgatagccggcgatccgctcgctgaacaattcgatcttgccgctgggcgtttgcagcgggttaacctggggatcggcgcgaaacgcgtcaaaaaatacaaactctttggccggcgcgggcagctcgacatagccccgttgccagaacgcctcaaactcgggccaggcgacgccggcgcgctgctgcgccgcgccgcattgccgatagatagcttcgatccaggcgcgctcatcgcggttttcggtaaagcgctcgcgataaccgagacgctccgccagatcggcgaagatatcgaaatcgttgcgcgcctgatgctgcggcgaaatggcctgatgcatcgccaacacgtagcgatcgcgcgacgagccgccgatgtcgttgcgttccagcgaactggtgaccggcaacacgatatccgccattttggctgccgccgtccaccagatatcttggacgatcaccgtatccggcttctgccaaccttccaccagtcggttcaactgctgatggtgatggaacgggttgccgccggcccagtgcaccagatggatatccggataatgccgcgtctcgccgcaaaattgataggcttcgccggggtgcagcagcatgtcgcagatgcgcgccaccgggatcgccagcccggccgggttatcccctaccggcatggtcggcgcgggggtatccacgcgcgggttgccgacgccgttcattgagccatggccgaacgaaaaaccgccgcccggcagccccacctgacccagcatcgacgacagcgcgatcatcatccagtacggttgctcgccacgatgcgcgcgctgcacagagtaggaacaggtgataaaactgcgcacgccgatcagctgccgcgccagcagcgctatgcgcgccgtcggaatgccggtgatggcgctggcccaggccggcgttttcgccacgccgtcgctcacgccgttcaggtaatccgccaactgttgataacccacgcagtggctgtgcaggaaggcttcatcctgcgcgcccagccgctggatttcgtaagccagcgccagcatcagcgccacgtcggtattcggccggatcgggatccattccgcattgacgaactcggggcaatcatcgcgcatcgggctgatgttgaccaccggcgtacccttgcgcgccagcttttgcagccagggcttgagcgcatgttccgccgcgccgccggaagagacctgagcgtttttcagcgccaacccaccaaacgccacaaacagctcgcaatgctccaccacgctcggccaactggtgacgcgcccggtcaacggcgagaaagtgccgatcacatacggcagaaagaactgcgctgcgccccagctgtagttgccctgctgatcgaccccgccgccgccgctgaaatagaatcgccgcaccagcgagcgggcatggtgcaaccgcccggccgacgaccagccataagagccggtaaacaacccggaggcgccgtagcgctcgcgcacccggcgattctcctgcgccaccaaatcgagcgccaattcccagtctacctcgacgaaatcttccctgccgcgcagcgtacggtcgctgccctcgcgcttttgcagccacgagcggcgcaccgccggcttgcgaatgcgtttgtcggagtaaaccatcggcgcgatggaatcgagcagcggcgaagggtcgggatcgtcgacgaagggttcacaacggataagccggccgtcttcaaccacggcggtataagcgccccaatgggcgagctgcggatagcgtttaatggacatggcgttctcggcgcaaatcggaatgcacagacgttacctcaagcccaccgccggtgccaacgtacaaattgcgctatcgttcggtagcagttggttatgcgtacagactcgaagagattctgcaaccgccgccacaagttgcgcacgagaccgcttgcagccccggtttttttccgcaaaactgggggatgtaagcgattacccaggatgtgttgactgatatggctacgataaaggatgttgccaggctggcgggggtttccgtggccacggtatcccgcgtgataaacaattcccccaaggccagcgaagggtcgcgcaccgcggtgcaggccgcgatggaacagctgcagtatcaccctaacgccaacgctcgggcgctggcgcagcaatccaccgagacgctggggctgatcgtctccgacgtttccgatcccttcttcggcgcgatggtcaaagcggtcgagcaggtggcctacgccacccacaattttctgctgattggcaacggttaccacgacgccgaaaaagagcgtcaggcgattgaacagctggtgcggcaccgctgcgaagcgctggttgtgcacgccaaaaggctgagcgatcaggaactttgcggctggatgcaacagatcccgggcatggtgctgatcaatcgcacgctgccgggcttcgaaacgcgctgcgtggcgctcgacgatcgctacggcgcctggctggcaacccgtcatctgatccagcaagggcatcagcgcatcgccatcatctgctccacccaccagatttccgacgccaccgaccggctgcagggctatctcgacgcgctgcgggaacacggtatcgcggtggatgaaaagctgatcgcctatggtgaaccggacgaaatcggcggcgaacaggcgatgaccgaattgctcggccgcggccgttcgttctccgccattacctgttacaacgatccgatggccgccggcgcgctttcggtgctgagcgataacagcgtcgacgtaccgggggaaatttcgctgatcggtttcgacgacgtgctgatttcgcgctatcttcggccgcgcctgaccaccattcgctacccgatcgtggcgatggcgacccaggcggcggagctggcgctggcgctggccaaccggcaaccgctgccggaaatcaccaacatgttcagcccaacgctggtgcgccgccactcggtcgccaccctcaacaacgcacacgaacagccgtaattcccgccgccgcatgggtgagccgtcacccatgcgctcagattgcgcagcccgccgcatttcccgcttttggattttttccgctcccagcgttcgtgcatattgttggcacaataacctttacactatatagcataaacgctatattcggagcgcgtcatgtggcaagtggtgaccgtcgaacggtttgacgactggtttttggcgctcaacaacgcccagcaaacaagcatcctggcggcgatctacaaattgcagacgttcggtccgcaattggcgcggccgcatgccgatacgctgcatttttccgacgcggtccggcagttgaaggagctgcgcattcaacatcgcgggcgccctttcagggtggttttcgcctttgatccacagcggcaagcggtattgctgtgcggcggcgataaaaccggcgacaaacgcttttaccagcgcatgttgcccatcgccgccatggagttttcacattatctggcaacccggaggtagtgcagatggccaaacctttatcccaactgatcgataaactcgatcccgccgtcgttgccgccgccaggcaaaaagcggaccaggagattttcgagctgcggctggcgatgctgagggaagagttggcggtttctcaggttgaattggcgaagcggctcggcatcagccaaccctccgtcgccaatttggaaaagcgcggcagcgaaatcaaactgtcgtcgctcaaacgctatatcgaggcgatgggcggcacgctgtcgctggatgtgcaattgcccaatggccagcaccgccgcatgacactgtgaagcgggcgccaggcgcccgcccgctgatcagataagttccagcgcgatcagctcttcgatggtttggcggcggcggatcaaacgcggctcgccgttttcgaacagcacttcaggcaacagcggacggctgttgtagttggaggacatcgacgcgccgtaggcgccggtatcgtggaacaccagataatcgccgatctgcaccggcggcagctcgcgggtttccacaccgccgcccgcctgctgggtaaacacgtcgccggattcgcacaacggcccggcgatcaccgtgtcgcgcagcgcttgccccgaggtatcgcgcccatcggccggcaacagcgaaatatggtggtaactgccgtacatcgccgggcgcatcagatcgttaaaaccggcgtccaccagcacgaagtggcggctgcccatgtcttttaccgcccgcacttcggccaccaagacgcccgcttccgccatcaggaaacgtccgggttcaatctccagctgcaccggatgccccagatgcgcggcgatgcgttcacgcgcccggttccacaaaccgaaatagtgttcggtatcgatcgcctcttcgccgtactgatacgggatagacaggccgccgccggcggaaatggcgctgatgtcatgaccgagatcgatcacctgctgcaccatcgcatcgcagacccgctccagatgctggtaatcgacgccggagccgatatgcatatgcacgccgatcagcttcaggccgtagcggcgaattttctccaccgcctgcggcaggtcggcataccagatgccgtgcttgctgttctcgccgccggtgttggttttctggctgtggccgtggccaaatcccgggttaacgcgcagccacaccgggtgccctgcggaaacctggccgagctgatccagcatgtcgatggaaccggcgttaaccgggatcttcaattcgctgacgcgcgccagcgtggcgtgatccaacacgtccgcggtaaacacgatctcgctcggttcgccgcccggttgaaaaccggcctgcagcgcccgttcgatctcgcccagcgacaccgaatccaccttcacaccctgctcgcgcatcaagcgcaaaatatgaatgttcgaacaggccttctgcgcgaaacgaatggtgtcgaagtggcgcagctgagcgatgcgctggctgatgatgtccgcatcataggcccagaccgggcaaccgaaacgctgcggcaaggccagcaggttagcggcgttcaacgcggtggaggtgtcgtgcaacgggcgtggcatggtgatattcccaattcgaaaatgacggcagataaagccatagtgccgcacgctgaatcgagtggaaaatatctatttagccgtagtctattcatttatgatatggctttctctacagtcgagcggcctcgccatgcacagtatctctttgcggcagatcgaaatctttcgggcggtgatgaccaccggcaacctgaccgaggcggcagccctgctgcaaacctcgcaaccgaccgtcagccgcgagctggcgcgctttgaaaagctgattcggctgcagctgttcgaccgggtgcgcgggcgtttgtcccccaccgtgcaagggttacggttgttcgaagaggtacagcgctcctattacggcctcgaacgcatcgtcaacgccgccgccggcatccgccagtttcagcaggcgcagctgtcgatcgtgtgtctgccggtattctcccaatcgctgctgccggcggtgtgccagccctttatcgaacgttatccggaagtcagcttcagcgtgatcccgcaagagtcgccgctgctggaagagtggctgtctgcccagcgccacgatctcgggctgacggaaaccaccctcacgccggcgggcaccgaacgggtgacgctgatgacgttgaacgaagtgtgcgtgctgccgacgggccacccgctgctggtaaaagaccaactgacgccgcaggacttcgccgggcagaactttatcagcctgtcgagcaccgacagctatcgtcacttgctggatgcgctgttcggcgaacagggcgtcgagcgccgcatggtgatggaaacgcacagtgcggcgtcggtgtgcgccatggtgagagccggcgtgggggtgtcgatcgttaacccgctgacggcgctcgactatgccggcagcggcgtgcacgtgcggccgttcagcatcgacgtgccgttcaccgtcagcctgatccggccgctgcaccgcccttcatcggcgctggtcacggcctttatcgaccatctgcatcagcaggcggcacgcttctccgcccggctggccgccgctgtcagacgctgaaagcggccagggaatattgccgaggccttagcgcagcgtcgcctgccactgcggatcggtggcgaaccactccaccagaaagtccagcatggtgcgcaaggtggcgggcatctggcgacgcgaggtgtagatgccgtagatgcccatcgactgcggccggtaatccggcaacaattcgaccagttcgccgctggccagcagcggggccgccgaataatagggctgcatggaaatgcccgcgccctgcaccgtgccggccatcaacaccaccgactcgttggcgctcaggttgccgctgaccgccaccgccgatttcaccccctgagcgtcgaagtgccacaggcttttgccgaaataggagtaggtcaggcagttgtgcaacgccagatcctgcggctggcgcggggtgccgtgtgccgccagatacgccggcgcagcgcacaccaccgatgcacaggtggacagcggacgggcgatcaggttgggatccagctcgttggtgatgcgcagcgccagatcgatgcgctcttccaccaggttcaccgcccggttgttcatctgcagatcgaccgccacctgcgggtgacgcttcagatactgagcgaccgcccccaccagcgccgtttgcccgagcgactgcgaacaggtaatgcgcagcaggccgcgcagttcgtcgctctgcccttcctccaccaggtcgatctcccccgccagcgccagcatttgtcggcaacgttccagagtacgctcaccggcatcggtcagactaagcttacgggtagtgcggtgcagtaaacgcgcgccggcccattgctccatctgcgccaggtagcgagtgaccatcgcgcgcgacatctccagcgtttccgcagcggcgatcatgctgccgcgatcgacgatggtgacaaaaacctcagcggcggtaatgcgatccatgattagtccgatttatgcaacgaataattgcttattatccggtttttctatcgctttatgcaacctaacatcattacaacattaaccgatacctaaggacctctgcccatgtttaagaaatcactgttaactctggccttcaccggcgtcgccaccctgagcacctacgccaccgctgccgataccctgaccatggaagtgtataacccgggcgagaaaagcgtgttcccggtgtcttccgaaatcatcagcggccaacacgaagtggcgctgatcgacgcacagttccagcgtaacgatgccgaagagctggtgaaaaagatcaaggcgaccggcaagaagctgaccaccgtttatatcagccactcagacccggatttctacttcggtctggacgtgattaaggccgctttcccggaggcgaaaatcatcgcttcgccaggcaccatcaaggacatcaacgccaccaaagacggcaaagtcgcctattggggcccgatcctgaaagacaacgcgccgaaaaccgtgatcgtgccgcagccgctgcagggcgacagcttcaccatcgacggccagaaagtggaagtgaaaggcctgaacggcccgacccccgatcgcaccttcgtctggatcccggcgctgaaagcggtcgtgggcggcgtcgcggtcgccggtgacaatatccatccatggatcgccgataaccagaccgtggaatcgcgccagcactggcagcagacgctgaaaaacatcgaagcgctgaagccgcaggtcgtcgtgccgggccacttcctgccgggcgccgcacagacgctggcatcggtgcactttacccaaaaatacctgaccacgctggaggccgaactgccgaaagccaaggattccgccgcgctgattgaagcgatgaaaaagcactacccgatgctgaaagacgaatcgagcctggaactgagcgcgaaagtgctgaaaggcgagatgaagtggccgcaataagcgcccgtgcgtgattgaaccagccctggcgccgcggcggcttgccgcgcgccaggcgaggagtaaaaatgaccgaaaccactctgcattacattttcgatccgctgtgcggctggtgctacggcgccgcgccgctggtgaaagcggctcaaagtctccccgggttgaaggttgtgccgcacgctggcggcatgatgaccggtaacaaccgccgccaaatcaccgatgaatggcgcaactacgtcattccacacgacaaacgcatcgccgagatgacgggacagccttttggcgaagcctatttcaacggcctgctgcgcgacaccacggcggtgatggattccgaaccgccgatcaccgctatcctggcggcggaaaagctggcgggacgcgggctggacatgctgcaccgcattcagcaggcgcactatcaggaaggccggcgcatcgccgacacgccggtgctggaagcgttggcgaaagagctggggttgccttcggcggcgtttatcgccgaaatgcgtttcaacagcggtgcgccgaccgcgcaacacatcgcggaaagccgggcgctgctggccaaagtgcaaggccagggcttcccgacctttgcgctgcaggatagtgatggccgcctgcatctgctgccggccggcaattatctgggcaatgtggaagcctggaagaacctgctgggcgccgccgcgctggcataaccctgctcgccccgatcgtcggggcgggtcattctacccgcacgaaccgcccttccgcccgcacgttgtgaccgaacccgcaatcgccccgcgtgtgcatttccaacgcttgctcgccaaactccatcgtcacgtcgcagacctgcgcgctttccgcttcatgctggtggtagacagccttgccgtgttcgatcggcagctcggcggagaagtcccccatgttcggcccgtaatacagccccatctgcggcatggcgtagccggagaaatcgatcaaccagcgctcgctctgcggcttcaccgccacttcgctccacacgcctcgcccggcgtattgccagtacacgccgcccggcccctgcggctgcggccgctgcgccagccgttggcgcaacaggctcaggttgtgctgcgatttgtcatcgtgcggcgccagcgccagataggcctgcgccttgagcaattcgccggcgtgcatcagcgacagcgccacgttgttgtaagccgtggcgacagcctgctcgctcaggccgcaaaactcgctccaggccgcctgatcgcgaaagatgtcggcggctttggcgtaatcttgccgctgataggccttttttcccagttcggcgtagctcgccaccttttggcaatcggcggcgatgtccggctcgtcaatgtgcgcccaggcccgggcgctggcgaagacgccgcaggtcagcaacaggggaaaccaagccttcatcgtttatcctttctgcaaaaattcggcgccagtataaccgccctgcgccggagtgtatgccgcaattgcgcccgccaacgcgccgctggcgattcagccgccttatttcaaatggttagcggagtcaaaactgcttacagtcgcggtttgtttgttaccggcccgcagcccatgctgaacaaaataccgcaattatcgagccgttatgaacgcaacccccttgcagaaacacgccgtgtggcagctgatcaaacccttttgggtgtctgaggagcgatggcgcgcctgggcgatgctgatcgccatcgtcatcctgtcgctcggtctggtctatatcagcgtgcagatcaaccagtggaaccaggtgttctacgatgcgttgcagaacaaaaactacccggtgttcaaagcgcagctgtggcgcttcacctatctggcgctgatcttcatcgtgctggcggtctacaagatctacctgactcaggggctgcagatgcgctggcggcgctggatgacggaaaagttcatgggaaaatggctggcgcaccaggcgtattaccacactgagcagcagcagatcgtcgataaccccgatcagcgtatcgctgaagatctcaacgtactgacccaatataccctgtcactgtcgctcgggctgctctccagcctggtgacgctgttttccttcatcgacattttatggcacgtcagcgggccgatgaccttcgcgctcggtcaacacgccatcaccttacccggctatatggtgtggttcgcgctgctgtatgcggtgctgggatcgctgctgatctggtgggtcggcaaaccgctggtcatgctgggctttaaccaggagcggtatgaggcgaacttccgtttcggcctgatccgcatccgcgaaaacaacgacgccattgcgctataccacggcgaaccgcgcgaggcgcaacagttgggtgaccgtttcgacaccattcgcagcaactggtgggcgatcatgcgcatcacccggcggctgaacatcgccaccaacttctacggccagttcgccatcgtgtttcccctgctggtggcggcgccgcgctacttctccggcgccattcagatgggcggcctgatgcagatcgcctcggccttcggccaggtgcagggtgcgctgtcgtggtttatcgacgcgtttaacgacttggcgacctggaaagcctgcgttaaccgtttggccggcttcaacgccgccgtcgatcaggttcaccatcagccgcgcggcattcagttgcgggaagagagcgcccatccgttgacgctggataacctcagcctgaacttgcccgacggccagccgctgctggccggcgccgagatgacgctgcaacgcggcgatcgcctgctgatcgtcggcccttccggctgcggcaagtcgacgctgctgcgggccatcgccggtatctggccttacggcgcgggcgccatcggggtggcggccaacgccaacacgctgttcctgccccagcgcagctatattccgatcggcacgctgcgcgaggcgctgagctacccgagcctggcgtcagaatacagcgacgaacagttgatgcgggtgctggaaaactgccgtctgaaacacctgcagcgctggctggatacctccgccaactggagccatcgcctgtcgccgggtgagcaacagcggctggcgttcgcccgcgccctgttgattcgcccgaacctcctgttcctcgacgaagccaccagcgcgctggacgacgaaaccgagcaactgatgtactgcctgctggtggatgaactgccggacatgacgctgatcagcgtagcgcaccgcaacagcgtggctaagtaccaccagacctgctggcgcttcagccgcggcgaagaccaaccggcgcgcctggcgctgagcccgttgccggcataactcacgaagccgggcgcaagcgcgcccggttttcgttcagatgccatcggcctgcgcgtcttcgcacttcacccggcggcgttcatgccacaggctggtcagcccgcgtttaccgctcgccagcgccacctcgcgaaattcatccaggctcagtccgtcacgttccagcatcatttccgccgccaactgcatgttgacaccggtcagcacttcgcaatcgccccgcgcatccgccagctcgcaggcgctacgaaacggcgaaccgccgagcatgtcggtgaggaacaccacgccgtccggctgcgccaccgcggccagcgccgagcgtaaggcgtcgttgagctgcgcggtgctcatctgttcggggaaatcgaccgccgcgcagtgccgctgcggccccaccacctgttccaccgcctgcaacagcccggtggcaaagccgccgtggccggtaatcacaatgcctggcatagcccgctcctcacaaaataccgataaatttgcccgccacgccgatgactacggtgacgccaatcagcttcaccggcgagaatccgcgcttcatcaggaagaaaatgagcagcgtgaaacacagcggcaacaagttgggcatcagcttgtccagcacgtcggtctgcagcgccacgctggccttgccggcatgcatcaccagcggcgtggacaggtgcacatacgaggccaccagcgcgccgatcaccgtcatgccgacaatggaggcagcgtgcgaaatgcgccgggtgtgggtcttcagcagcgccagcgcgctggtgccggcctgatagccgtagtgcgccagcccaaaacgcaggccgaagtggaacaggttgaacagcagcaggaagacgatcggcccgaacaggctgccctccaatgccagcgaagcgcctatgccggcgcagatcggcagcagcgtcagccaaaacagcgcgtcgccgatgccgccgagcggccccatcagcgccactttcaccgcgcgaatggtggagattttctccttgttctgctccatcgccagcaccaggccggacaggaaggtgacgtcgaacgggtgcacgttgataaattccatgtgcatcttcatcgagttggccagatcctgcgggttgcggtggatcttgcgcagcccggggatcaactgatacagccagccgcccgcctgcatgcgctcgtagttgaacgacgcctgcaacagcagcgaacgccaggccatgcggttgatgtcgccgcgcgtcagcgcttcggcgggctggctgtccagataatcgtcctgttccacctggctggtggccagcgcctgcgccatgcgctgctcggctttttgcgccagcagatcgtcggaatcgttaaatgccatcttcggcgtcctcctgcggagcgggccgggtggttgcctctgccgcgccgcgttgcgtgttgaagaagtcgatcagagcgatcgccagagcccccagcgccaccgccaggatcggcagcttgagaaacgtgaccgagatgaaaccgaggataaaataggccacgtaggtttttttcatcatcactttcatcagcagcgagaaaccgatcgccggcatcatgccgcccgccaccgccagcccgtccagcagccagcccggcgccttctgcaccatggcgctggccgcatcggcgccgaagtaaatcggcaggaacgccaccacgaaatagaagatgaacagaatgctgatgcccaggtaattcacccgttcgataccgcgccagttcagcgctttcaccatgcgatcgcagcggtgcatcatcggtgaaaacagcgtaaacagcagcgtgatgcagccctgcaccgcaatcgagaacggcaccgccacgccgatcgccactttaggatcggccttggtcagaatggcgaatgcggtgccgatcaccccgccgatcaccacgttcggcggttgggcgcccgccagcggcaccatccccatccacaccagctccagcgtgccgcccaccagcaacccggtatagacatcgcccaaaatcagccccaccagcggccccatcactaccggccggtggaagtgggtcagaccgtcgaacaggtcaacccccgccagcccggccaacagcgcaatcaataacgcatccgtcaacatgctttccccctggctcaaaagagcagtttgccgatcgactcgcccgcttcatccggcacccggcgcacttcgcactccacgcccagctccgccagcgcgcggaacgcggccacgtcgccgtcgtccagcgacaccgttttgtgcacctgccgcttcccctcggcgaagtgcatattgccgacgttgacgaaacggatcggcaccccgccgcgcaccagcgtcaacacatcctgcggcgttttgcacaccagaaagatcttctgccgatccgccgccttgtggatcacgtcaatggttttctgcagcgtgaaataacgggtctgcaccccttccgccaccaccatgtccatcaggttctgctgcaccggatcggcggcggcctcgtcgttggccaccaccaccaggttggcgccgagggtattggtccaggtcacgcctacctggccgtgcaccaggcgattgtcgatgcgggtcattaaaatgttcggcatatcagcggccctccgggtaacaggcggcgtggtaatcgtcgagcacctgcgtcactttatgcagcacccactcctgcggatcggcgctcaattcgccggcgttcagcgcccgcgcctgatccggcaggtactggctgagcagcgccagcggcgccgggctgcggcgcaggttgtccagcaaaccgtcgaccgcctgctgcacctgcggctgcggccagtagtaacgcacccgatcgctcaggctgtagtggcgatcgaggtactgttggtgcggcgtgccgtggtaatagcggctccactgctgcggctgctcgcgcatcacctgctccagcgtggcgcacagctgcgccgactggcgttcccccagccattcgcgttcgatgcgatcgagggcgaacagcgcttcgcgcagcgcaaaggtcagcgccggccccaccttcaggatggcgaaatgatcgcgcaccagctggcggtaggcctgcggcggctgatagtccgtggagtgcgcttcatagatcatgcccggctgccgttcaatgaaatggctcaatgcgtcggcgcgctgtggctggtagtgctcaacgctgtagtgatcgaactcaacgcccggctgcaccaccagcgcaatagttcgctgccaggcatcgttcagctcggccttttgccaggcgatacgatgtgtttccagcgtttgcgccaccgcctgcggcgtggtgacctgtagacccgccagcgcctcctgcgcgccgcccggcaccggcacttcggtgccgatcacatagaccggcgcttcgccgccgctctgcgcccaggcgcgttccgctaccgcgcacaaacgcgccgcccgctcggcaaccgtggcatcccccagatgcgagggatcatcggcgcacgacatggaacaatcgaggtgaattttgcgaaatccggcgcgaacgtaatcgtctatcaaggtttccgccagcgccatcgcttcctgagccgggcgatcttgccaagcgttgggccccagatgatcgccgcccagccacacgcgctcgcgcgccaggcccacttcatccgccagacgccacagcgcatcgcgaaactgggccgccgtttggccggtatagccgccgaactgattgacctgattggacgtcgcctccaccaacaccggcgtgccacgcgctttggcctgccgcagcgcggccttcagaacccagggatgggcggaacagacggaaaagatcccgaccggcataccggccttgtgctgctcgacaagctgtaacaactgctgcatgaagcccccatgcaggcgccgtgctaccgatcggcgatgatgacctcaacgcccagctcggttaacgcccgctcgtaatcgtccggaagacggctgtcggtgatcagccgatggatttgtccggcttcgcgaatcatgcaaaagcttttgcgaccaaatttgctggcatccgccaccgcgataatctcacgcgccacctcgcacatcacgcgattgaggtgcgcctcaccggggtgaggcgtggtgatgccggcgcttagatcgaacccatcgacgcccaaaaacagtttgtcgaagcggtactgacgcaattgctgctcggcagccggaccgtagagcgagtaagagttgcggcgcacgctgccccccagcaccatgacttccaccccgtcgtttcccgaaagctcgtaggcaatgttcagcgcattggtcatcaccaccagatcgcgccgtcccttcagaaacggcacgatctgcgcggtggttgaaccggaatcaaggatcagcgcatcgccgtcgcgcacatagccggccgccgcgttggcgatcagcgttttgacgtcgcgattcaaccgccctttgtcccgcagcggccgatcgaaagcgaattgctgattgagcatcgcgccgccgtaagcgcgcagcgcacacccttttcgttccagaaagcgcagatcgttgcggatcgtcaccgtggataccgcaaactgtttgctgagctgctccacgcgcacgctgccgtgctcgcataacagatcgataatgtgttcacgtcgctttgcggtattcactggcatgagctgcggtcctcaggtttccggcatcgccggggagaagatggctttcgctctactgcgctggcattacagcaaagcgaaagcaatgaaattgtgatcgggcttacagccccgttttagcaaaaaaaccgccaaaaaacctttcgaatcgaaacggatcgaaaagcctaaaagcggaaggggggaaaagtgaaatgccatgacgggcgataacccccggagcgctgaggcgtgggctgcacggaaagcgaaagcgacgcatggtgcgccccgcgccatgacttttagttcactcagtgaccaggatcacataatggcaattatccgtcggccggcggggattaaccgccgccatcccgccgggccgtccccttgtcagcacgagacatcttccctacactggcgaacggataccgtcgattttcggtacgtaagcgttaacgtcaatcaacgcatcacgccatgcagcactgattgactgcatgccctggtgcgaggaacccatgccgcaacccgcttcacccccagcgtccaccgtgaccccgcgtcgccggttacaccgccctattctgctgatcgtcggcattatgctgatcgcggccaatttgcgcgccgccctgaccagcgtcggcccgctgctggagcagatccagcaacagctggcgttgtccgccaccgccgccggcctgatcaattcgctgccgctgatcctgttcgccatcctctcgccattgaccccgacgctggcgaaacgcatcggtatcgagcgcaccctgggcctcgccctcgcgctgctgatctgcggcatcgccctgcgctccctgccgcaagacgccatgctatggccgggcagcatcctgatcggcgccgccatcgccttcgccaacgtggtgctgccgacgctggtgaaaagagatttcccacatcgcgccgccgcgatgatcgccgcctatgcggcggtgatgtcgctggttgccgccatcgcttcaggtttggccgtgccactggcttcgctggccgaccttggctggcggttctccttgttatgctggggcttgcctgcgctgttggcgctgctggtgtggttgccgcagctgcggcgctccgccacacccgccactaaagagccgcagccgacggagccgcaacgctatcgctctccctggggcagcgcgctgggttggcaagtggcgatgttcatggggctgcaatcgatcgccttctacaccatcatcggctggttcagcgcttttgccgccagccacggcacctccgctcagcaggcgggtttcgaactgttcgtttaccaggtggtggcgatcgtcgccaactttgtcatggtggtgattttgccgcgggcgcgcgatcagcgggcgatcgcgttgggcagctctctgctgatcttcatcggcgtcgggggattattggtgcaacccgccagttcactggtgtggctgacgtttgccgggttgggggcggggagttcgctggtgctggcgctgtcgttctttggattgcgcagtcagcatcatcatcaggcgacgctgttgtcgggtatggcgcaatccgtcggttatctgttggcggcgctggggcccaccctattcggcctgctgcacgatctgacggaaggctggcgcttgccgttgatcgccctgctgggcctgaccgtcttgcaaatgctgttcggcgcgctggccggccgcagccgcgtgatcagctaacgctgcggcgcaatgggggccgcacgggctcagagtcggtgtcctgccataaatcatcaataaaggcgcgctgctcatcgctcagcacccatgacggcggaattttggactgtgcgcgacgctcagcgccctcacggtttttagcctgctttttgttcacgaatcgccttcctgcttaacctgctaactcagtaaccagtaaatcacggcggcggttaacagccagaacagcccgctaccgataaacacacacagccatgctctacgtttgatatccgatccatccttgctcaccacagcgcccccaaccaatagattaaaccactcaaacagcaattattgatctgttttaacgatcgataaagtcgttttttcctatggaaatttaaaaaacagctgctagccatagacctgcatcaccgcctcagtaagaacggcaccgtggatatcactgttatcggcaggcgataacttgaattgataggcgaacgaacgtgcagtgtgccataccttgaaaggtcaaaatcaaaccactggtaaataattcaaccatcaattatttgactggtcataagccaaatcggcaacagacagcgctgaaggcgggggataaaatgaagcgacgcactgggatcatacggtgagaagcaccggcccgcgttggtctcgctcgggccggcgtgagttaaccgattctgctgacggaatcccggctggcgtgttcacgctcgctgccggtcagctcacgtaaatgacccgagcgcatctcaagcagccgatcggcatgttcgaaatagtgatcgtcatggctgatggcaaacaccgttttgcccagcgcgcgcagttctggcaacagctcgcgatagaaaatgcgccggaattgcggatcctgatccgcggcccattcatccaacagcaagatatcgcgctgttccgccacggccagcagcaaagccagacgcttgcgctgcccctgcgacagttgcgggttggtcaccctggcgccgtcgaactgcagcttgcttttcatattcaaccgctcgagccagccggcgaccagttccgcatcgggttcgccgccttccggcccttgcaaacgatcgaactgatgaaaatcggtgaaaatcgccgaaaacagccgacgatagtccggcatatccgccgcgctctgcgcgacgccatccagaacgatgtgcccgctcaccggccggtacaacccggtcaacagcatcgccagcgttgacttgccgctgccgttgccgccgatcaaaaagatcagctcgccacgccgcagcgtcagattaagcggcccgacggcaaaaccgggctgttgctccgtatcggcatagtgaaaaaccacgtcgcgcagctccagcgtctgccaggaacggccggcggcggcagggaacgccggttggtattcggccaggcgcagcgtcttcagcttgttgaaagcgacttcggcgctgaccagcgtcggaaacgccccgaccgcctgcagtaatggcgtgcgcaagaacagcagcgtcagggaatacgtggcggccaccgccgagttcgcccatcccaggctgttagccataaagaacaccagtccgatcgcccccaacatcatgatatttgaccagttgagcgcactcagatggaaggtatcggcgcgaatgatatggtggcggtaagcttgcgcatcgggttgataggtctgttcgtacagcgcctgcgctcgcttgcggtttaacgtcagttccttgcgaccgtcaatcaccgattcataatgatgatagagacgctcttccgactcgcgcaaactggccatatggcgataaacccgcgagaccaggcaaccgctgcccaccacggtgaccgcgacccacaccgccgtcaccgccagcattttcggtgatagccaccccagataggccgccgaccccagagttaaaatcaccccttgcaccagttcgggcaagcgcacgaaggcgacggtgatattgcggacatcgctggagagactggccaacaatgaggcgctgcctaactgttcaaggcgttcaatatcggtatccaggatgcgcttcactaactgcccgcgcaggcggtagacgaagtaatggcccaatgtcgtcagcgccaattgcgatcccagcgtgaccgccatcagcaatgccagcagagcgagaaacatcggcagcacagccaatgcatcgccgccggcgtccatcaggtattgattgataaacgcaatgataccgatgcccaagccagcgctggtcatggtcaatgccataaccgccagaaatggccaacgatactggtgataaaccacccgtagcagttccatgaaaaacctctgaagtcgcgatctggcaggcattgtaagcggcgcgagaatgagatcaagacgaattctcattgctcgcgcagcctctgaattcgacgccaagggcattttgatgattgcttattgaaacgagagacttacactggcgccacttgccgctgaagggaacagccgattatgctcgccactcacgaatacgccaacgacctgattctgtttgccctgattgtcgactgcggctcgttcagcaaggccgcggagagcgccggcatcaccagctcggtggtcagcaaacgcatcgggcggctggaaaaatcgctgggtgcccgcctgctgtaccgcaccacccgcagcctgacgctgaccgaaagcggccaggcgctctaccagcaggccaaagagatcggcgccaaagtgcaggaggcgctgtacgccgtcagcgaaaagagcgaagagttgaccggcaccatccgtatgtcggtgccgaccatttcgggcgagctgttgctgagcgaaagcgtggcggaattttgcgccctgcatcccagcctgaaggtcgaaatgcggctggaaaaccgcttcgtcgatctggtggaagaaggcatcgatctggcgatccggaccggcaccatgccggattccagcctgattgcccggccgatcttcgattcccgctgggtgatcgtctgctcgccgggctacctggaaagccacccggaaccgcgcagcgccgacgatctgctgagccacaactgcctgacctacacctaccaggagagcggcaccaccaactggctgatgaagcggccggggcgcaacgacatctacgagctgcaggttaacggcaacctgtcggccaataatgcgcgggcgatccgcaaagcggtgatcggcggccacggcatcgccatggtgccgcgctgcatggtgtatgaagatttgcaggacggtaaactgatggagatcctggccggccactgcggcaaagtgctgggcatttacgccgtttatccttacacccgcaatctgccgttaaaaacccgtctgctgatcgaacatatcatcggttcctaccaaaatatcagccattatttttgagttccctgctctgattatttccctgcggccgtaaaaagacgcggggattaccgcatttttggacatgaactattgaacattaccgcttaattaatgtgagctcacgcattcattacacaaaattacttcctatcaaactgattttaaagcagttaatttaacgcctcctgccggccagtttcccaccgccggcgccgttcgccgatgttaaaaaattaccgcatggcatcgtcgccaacgttgtgattagaatgaaaatgttgcggtaattaacctttcagctacatatctctgcccataaaaataataaccctgaggatcttatgcccctgcttttcagtattgcgcccatcgtcctgctgatttggatgatgaccaaaaggaatggcgtgccctcttacctcgccctgccgctgacggccgccgtggtgtatgccgtacagctcctgtggttcgatgcctcgctgcggctgctgcatgccaatatcatcaccgcgctggtgtcgacgctgacgccgatcaccatcattgccggcgccatcctgctcaacaaactgatgcaggtaagcggcgcggaaaacgtggtgcgccgctggctggaaaccatcagccccaatcccgtggcccaactgatgattatcggctgggcgttcgcctttatgatcgagggcgccagcggcttcggcaccccggccgccatcgccgcgccgattctggtcgggctgggcttcaacccgctgcgcgtcgccctgctgacgctggtgatgaactcggtaccggtctccttcggcgccgtgggcacccctacctggttcggctttgccaatctcggcctgtcggacgcaagcctgctggagatcggccggcaaaccgcgctgatccacttcgtcgccggcttcgtcattcctctgctggcgctgcgctttatcgtttcctggcaggatatccgccgcaacctgccgtttatcctgctcagcgtgctgagctgcactgtgccctatctgttgctggcccaggtgaactatgagttcccggcgctggtcggcggtgcaatcggcctggcgctctcggtgctgctggcgcgcggcggcatcggcctcgcccgcggcgacaaaccgcagaacgccgggcaggcggtgccgttcatgcaggtggtcaaggccatgaccccgaccctgctgctgattgctattctgatagtgacgcgcgtccaccagctgggcctcaaagcgctgctcaacaacaccgcgctgctgtggcgggaaaacctcggctggctcggagagctgcgcatcagccgggcgctgatcgtcgaactgcagcaggtgctggacacctccgccgccgccggctacaaaacgctgtatgtcccggcgctgatcccgttcctgttggtggtgctgctgtgcattccgttgttccggctgaatggcggccaggtgcggcaaatgttcagcgaaaccggcgggcgcatcgcgcggccctttattgcgctgttcggcgcgctggtgatggtcaacctgatgatgcagggcggcgacaacgcgccggtgatcctgatcggtaaagcgctggcggcgctgaccggcggcagctggctgctgttctcgtcgttcctcggcgcgctgggctcgttcttctccggctccaataccgtttcgaacctgacgttcggcggcattcagcagtcgatcgcccagagcagcggtcttgacgtcaacctgacgctggccttgcagtccgtcggcggcgccatgggcaacatggtgtgcctgaacaacattatcgcggtctgttcgatcctcgggatcggcaacgccgaaggcaaaatcatcagaaagaccgtactgccgatgctggcgtacggcgggattgcggccggtatggcggcgatcctcacgctctgaccgacaactcgttatcgcaagcaagacaagaaggtaaacactatgatcatctccgcgtcaaccgactaccgggccgccgcccgggccaaactgccgccgtttctgtttcactatatcgacggcggggcctacgcggagcatacgctgaagcgcaataccgcagacctggccgatatcgccttgcgccagcgcgtgctgcgcaatatgtccgaactcagcctggagaccacgctgttcggtgagcagctggcgatgccggtggcgctggggccggtggggctgaccggcatgtacgcccgccgcggcgaagtgcaggccgcgcgcgccgcggccaaaaaaggtattccgttcacgctgtccaccgtgtctgtctgcccgatcgaagaggtggcgccggcgatcgatcggccgatgtggttccagctctacgtgctgaaagatcgcggctttatgcgcaacgcgctggagcgcgccaaggccgccggcgtgaaaacgctggtgttcaccgtcgacatgccggtgccgggcgcccgttatcgcgacgcccattcggggatgagtggccctaacgccgccctgcgccgcgtgctgcaggcgtttacccatccgcagtgggcctgggatgtcggcctgttcggcaagccgcacgatctgggcaacgtctcagcctaccgcggcaaaccgaccagcctggaagactacatcggctggctgggcgccaacttcgatccgtctatttcctggaaagatctggagtggatccgcgaattctgggacggcccgatgatcatcaaaggcattcttgatccggaagacgccaaagacgcggtgcgcttcggcgccgacggcatcatcgtctccaaccacggcggccgccagctggacggcgtgctgtcgaccgcgcgcgccatgccggcgatcgccgacgcggtgaaaggcgacatcactctgctggccgattccggcatccgcagcggcctggacgtggtgcgcatgatcgcgctgggcgccgacagcgtgctgctggggcgcgccttcgtctatgcgctggcggcggccggcgaagccggggtggctaacttgctggatctgatcgacaaagagatgcgcgtcgccatgacactcaccggcgcgaaaaccattgcggagatcaacgccggatcgctggtcagaaacgcctgactcacagcggctgcacgccctccgggtaggcgttgtagctcatcttgctgatgaacgccccagccggtgacaccagaacccggccggcggcgtccaacccgaggaaggtgccggtgcagcgcccggagataaagtcgaagaagaacaccgagcacaccgggataatcttttcccggaaggtgaacaggaacatctcgtcctcaaacttgtagtaagtggcgtaatccatgtcgccgtgcccgaactgctcgccgcgcaggttttgccaggcataacgctcggtgttgacgtagaagtgctcgtagtaatggttggggctgtaaacgttcagcgtgcgataaccgatcagctcgcgggtcagatgcggcgcgatgccgcccggcgtaacgccggcaatcagcccaacgtggaagctttgcttgaggcgggatcccttttccaccgtttgttcgggcaacagcgtgctgcgcaccagcagcgcccggccgctgtcgcggttgagcaccagcgtcaggcattcgttgcccggcgactgcaacggaatattgaagaaatagcgcgcggcggaggtttgcacctcttcgtaagcgtcctcaccgctctcccctccccaggcccacagcacccgctgccgatcggcgctgaaacgcagcgtgatttccccgccgtcttcaaaggcgatctgcaacgttttgccgcgccagtcctgagtgcccggcagccggttggtgtcgatgccgcgcgcaaaatcgtcgtaattcttccagtccggttcggcattttgattcagtacggatggttctgctgacatcttcgctctccttgattgaatgggatgaaaaccgcctcagacgtcggcgatgcccgccggtttcaccgctcggcggttcaccacggcaggggcagtttcatcgagaaaacaactcagtacgccggcgcacacggcgccggcggccgccagccacatcacgctgaccagcccgtagcgatcggcgatcagcccggcgataaacggcgccaggcagccgccaatcacctcgccaattcccatcaccagccccaacgcggtagcgatgcgcgccggcgacaccgtttcagacgggatggtggccataaacagcgtgaaacagccaaggccggtataagacaggaacaccagcacgcccagcagccacgggttatcgacgtagctcagaaacagcgggcagcacaccgccagcagcgaaaagaagatcagcgtcggcttgcggccgaagcgatcggaaatcgccggcaccgccacgccccagaacacccaggcggcgccgatggcgctcatgatgccgcccatcgtgccttcgccgaagccgcggtcggtcaccaaaaagttgggggtgaaggtaatgatgatcatgaaccaggtgacgaacacacaggagatcagaatgcacagcgccacgttcttgattttgaacagctcgccgtaagcacctttgttcgccgtcttgtcggccgccggcactgcgctgaaagcgggatccttcttgccgttcacatagcgatagatcagccacgccagaatgatgcccggcacggcggtcaggtgaaacgccatgctccagccccacttctgcgccagatagatgatcagcggcggcgcgataataccgcccaacaatcccggcgccgccccttggatcaaccccatgttgaaaccgcggcgctgcggctgcgatttttccaccatcaacgactgtgcgatcggcaataccggcccttcggcgatccccatcaacgcccggaagatcaatagcatggcaaagccgctgaccaaccccgacagcgcggagaacagcgaaaacaccaggatcgacaggatcagcatcggtttacggatattaaaacgatcggctatcgcccccagcccggcgccagacagcgcccaggttaacgccagcaccgccgacagggtgccgagatgcacgttgctgagcttgaggtcggcggcaatcatcggaaacagaaacgagatggtcagacggtcgacaaacacgcagccgaaaacgaaaaataaaataatcagcaaccggttctcttcacttaatgcgctgcgaggctctggcgatgtattcatagcgtcatttgtccataagttaacttatgaatggcgacccgccatggcataagtgtgttaagcactcggccaagagagaaattggccctccgtcacgacaacaactcattaacatgttaatgacataaaattatcgcaagccggcggtctgtcaaccggcgctttcttagagacgaatgaagtttttgttcggtactattttaaaatcgcattatcacaaaaagatattttacccttctgtttttacagccaataaaataataacgggtatttttcttcggttaaaaacgcctattttcacgccatttgcgaataatctcaacgatcactcttcaggcttattaattttttacccgtattgaatgaacgctggggaatattcagttttatttttatctattgaatcatttagttttattttattgccgcacaacaaactaactcttatgagggaaaggctattggcagagttacataatttcatctggacaatagcaaaagcgcagagcgtgacgtaaatcacggcaatcatgccgtatcctgtaaggtaattatgctcgcaacagcaattatctattgcgattagggctgtttatctcaattaatcgtcatgcaacacttcgtgccatcgttcgacaccgcgccgcaaggcctgagacggagtgacacatgagcatcgaaagactaacccgggagccgctttccatcggtattgagctgccgttggacaatgattggtccaccagcgggcagctgaaacgccagcaggacgggcggccgttcggcgtaccggacatgagtgaacacgctgcgcgcatcaagctggccgatgagctcggctttcgcgccgcctaggttcgcgacgtgccgctgtacgatcctgacttcggcgacgccgcgcaggtgtttgagacctttacctacctcggctacctgtccagcctgacgcgcaatattctgctgggcaccgcggccgtggtgctgccgctgcgccagccttggctggtgcgcaaagcggcttccacgctgcaaacgctgagcggcgatcgtctgctgctcggcgtcgccagcggcgatcgccccgtggagtacccgctgttcggcgccgattacgccgcgcgcggtgaaaacttccgcaccagcgtcggcattctcaaaggtgaagccgacagcgcgctacagcccggattgcgcctgctgccggccacgccgccgccgccgctgctggtcgccgggctggcgcaacaaacgcccgagtgggtgggcaaaaatatggatggctggctgtcatatcccggcacgcctgcggaccacgtttcgcgagtcaaactctggcgtaacgtagccggtgacaagccctacgtcagctttattcatctcgacctcaccgataacgccgacgcgccgattcagcgccatcgcttcggcatcaagagcggccgcaatggattgattcaggaactgagcgccatgcgtgacgccggggtcaaccacatcggcctgcatttccgccgcaaccagcggccgctggaagagacgatgcaggagatcggtcaactggtgttgccggaattccatcgcgcctgaagcccgctttagcccgctattccgacctgagcgggtctttgccccgttaccggggcttttttatttccgccgctgctagttcataacaactcagtctaatccctgcggccaaacggcggcatgatgacggggaaacgagccaccatgaggaatgagcaatgacggcaaaactgacagaagcgggcttttggcgcaaaaccgccgactcttcatcgctgcgcgagccgcgcgtgctgatccgggtctacgtcgacgaaggcgagattgaccgcgccattgcgttttacgagcggctgcacggcgtggaagcggatatgcgtttcgactttcccgaacatcggctggtgctggcggcggtggggccgtttctgatcctggaaggctcggaagaaagcctgcgtcctttccgcagcaccgtcggcacgttgctggtcgatgacatttatccttaccaccagcggctgctggccgccggggccgatatcttctttggcccggtggacgtgcccaccggcgcctgtttcaatgcgcgcctgccggacggcacgattatcgaatacgtgcatcaccggccgcgcgcggacgaataagccgcctcaagggagcgccggcgtcatggcgtaaccgcgcagatccttgcgcaggctgaccatgtacaacacgatcaccgccgagaacggcaggccgcacagcaccaccgcggtctgcatcgcgctgaaactgccggcgtacagcaacccggcgcagatcaaggtggtgaccgccgcccaaaatacccgcagccaggccggcgcgtcatcgtgggcggaaccgccctggcaggagaggttcgctatcatcagcgtgccggaatcaaccggcgtcaggaacagcacgaaactgatcaccaccacaaaaccggcggtcagctgggtatagggcaggtattcgaacagcttgaacaccgccatcggcggatcgctttgcgccacctgcccgaggatcgcctgcccgccttccaacaccaggctgatggcggtattgccgaagatcgacagccacgccagcgtgaagcccagcgggatcagcaacacgccgaagatcaattcacgaatggtgcgccctttggaaatgcgcgcgatgaacagcccgacaaacggcgcccacgccacccaccaggcccaatagaacaacgtccaagcgccctgccactggcgcgccttgccgtacagatacatatcgaagctgcggctgaccagcgaagtgagataatcgccgaggttctgcaacatgccgttgagcagattcagcgtcgggccggccagaaacacgaacagcaacagcaggcacaggaagccgacgttgatgttcgacagcatcgcaatgcccttctcgacgccggtgaccgccgccagcgtggccaccaccatcatcaccacgatcagcgccagcagcacgccggtgctttgcggaatatcgaacagataaaacagccccgagttcaccagcagcgcgccgatccccaggttggttaccatcgaaatcaccgtcaccagaatgccgaagctgtccaccagatggccggcgccgccgtgggtgcgctcgccgaagatcgggtataacgcagagcgcagcgccagcggcaggccgcggcaataggcgaaataggccagcgcggtggcgatcagcgcatacagcgcccagccgtgcagcccccaatgcaaaaaggtcagcgccatcgcctgccgcgccgcctgcacggtgccgccgctgccttccggtggcgacaaaaaatgatccaacggttcataggcgccgtagtacaccagcgcaatgccgatgcccgacgagaacagcatcgccacccacgagggatagctgaactgcggcggttcgtcatcctggctgaggcgaatatggccgaagcgcgacagcgccagccagaagacgaacaccatgcaggcgaccatcaacagcatgtagtaccagccgaacacgtcggcgacccaactttgcgcgacgttcaaccactgtttgctggctgcgggaaacagcacgaccagcgatcccagcagcaggatcaccgccgccgagccgaaaaataccgggacattcaatctgacaggttcttcgtcaagcgatggaggagtttttgttgtcattggcaggcttccatgatgcgaaagacagacgatttaaatgcaacctttaattaacattttatcgtcatttatttgacatttccgcagcatatagagtattgattgaccgttcaatcaatcaaatccaaagtgtgattggcctatcagttgaggaaaatatgtaccgaagagacattccggagcagcgtaaggagcagttgattaacgccgccttcgagaccataaacgtcgtcggactggccggcgtcaccctgtctcaggtcgcgaaagaagccgggctgtcgaccggcatcgtcagccactattttggcgataaagaggggttgctgagcgccaccatgcgcaagatcctgcgcgatctgcgcgacgcggtggccgagtgccgcgcgcaagcggcgagcgacagccagtcacagctgttcgccattatccagggcaacttccaccccagccaaaccaacgccgtgtccatgcgcgcctggctcgacttctgggccgccagcatgcatcagccggtgctgcgccgcctgcagcgcgccaacgatcggcggctctattccaatatttgctgccagttccgccgcgagctgccgctgcagcaggcgcgcgacgcggcgcgcgggctggcggcgatgatcgatgggctttggctgcgcggcagcctggccggcggcgagacagacctaaagcaggactgccgcatcgcctgcgactacgtggcgcagcggctcaacgccgctcagccgctgaggtgaacgtgaacgactccgtcagtgcggttcctgctcttcgctgtactgggtttgccacatggcggcgtagcggccgttcgcggccagcaacgcctcgtgccccccgcgctcgacgatctcccccgcctccagcacgataatttcatcggcatccaccacggtggagagccgatgagcgatcaccagcgtggtgtggttgcggctcacctcgcgcaggtgcccctggatttcgcgctcggtctgggtatccaacgcgctggtcgcctcgtcaaacaccaggatggccggatttttcagaatggtgcgcgcaatcgccacccgctgcttttccccgcccgacagcttcagcccgcgctcgcccacccgggtgtcgtaaccgtcgggcagaccgacgataaaatcatggatatgcgccagccgcgccgcccgctcgatttcttcatcgctggagccggttttgccgtaaccgatgttataacgcaacgtatcgttgaacagcaccgtatcctgcggcacgatgccgatcgcctgccgcaggctggcctgggtcagttggcgaatgtcctggccgtcgagggtaatggcgcccccctgcacgtcgtaaaagcggaacagcaggcgcgacagcgtggacttgcccgcgccggaggcaccgaccaccgccaccgtgtggcccgccggaatggtaaaactcacctgcttgaggatcggccgacgcgtgtcgtaaccgaagctgaccgcgtcgaacctcacttcgccgcgatcgaggcgcagcggctgcgcatccgggttatcgacgatctcacgcggttcctgcagcagatcgaacatgttctccatgtcgatcagcgcctggcgcacctcggaataaataaagccgaagaagttcagcggctgatacagctgcagcagataggcgttgaccagcacgaagtcgccgaccgtcatcgtcccctgcgtaatgccccgcgccgccatggtcatcatcacgatcagtccgatcgagataatggcggtttgccccaggttgatcgccgtaaaactgaattggttcttgatggcggcgtattcgtacaaccggcgcgacaggtcgaaacgctcggcctcgaactcttcattgccgaagtacttcacggtctcatagttcagcaggctgtcgatggatttgctgttggcgtcggcgttggccttgttgagctcgcggcgaaagcgggtgcgccagctgaccgccagcacggtgaacaggatgtagcaaccgaccgtcgtcaggatcgccagcgcgaaccagccgttcagcatatgccacatgatcgccgtgaccagcgagagctcgaacaggatcggcacgatggagaacagcagccgtgacagcaccgtggacaccgcctgagtgccgcgctcgatggacaacgacaatccgccggtctggcgctccagatggaaacgcaggctcagcgcatgcagctggcggaacacccgcacgcccaacaggcgcgtggcgttctggctgacgtggataaacatcacgttgcgcagttcctcaaacagcgcgccgcccacccgcgccacgccgtaggcgacgatcagccccagcggcaccgccagcattttcgccgtctcgccgctcagcgcatcgaccatcgctttataagccagcggcaccagcgtggtgctgaccttggccgccaccatgaacacgaaggccaccaccagataccaacgcagccgcgggttatctttcggccacagatagggcagcaggaatttcagcaaacgggaacgatccatcatgtaatattcatcttctcggtcgggatcgcggcgcacagccgcgcggggttatgagtttggcctggccggcggcgaacgccgcaccattccgttttcctgcagcgataactcagcatcatccgtcaggagaagtggcggcggctcgggcaaagttcaggcatggaggagacaatcacatgacccagacgtatgcaaagcgttttgcgctggtctttgactatatcgaccgccacctggacgaggcgctcaccgtcgaaaaactgagcgaagtggcccacttttcgcgctttcactttcaacgccagtttagtgcgtattgtggcatctcggtgtggcgttatatccagtggatgaggctcaaacgcgcctcgtaccgcctggcgtataacccgctggagccggtgattgacatcgcgctggacgccggttttcaaaacccggagtccttcagccgcgccttcaaacaggcgttcagccaaacgccaagccagtttcgcaaacggccggcctggatcgattggcaacagcgctttcccgagccgaaacacaaaaggaaacaacccatgaaggtagacattctcgacttcccggccacgccggtggcgatgatcgaacatcgcggcccatccgcgctggtcaacgaaaccgccgcacgctttatcgagtggcgcaaaaccagcggcctgtcgccggtcagaagcagccgcacttacggtatcgcgccgcacgatccggccaccaccgaagcgcaggacttccgcttctacatctgcggagaggtcactgcgccgatcccggaggacaacgccttcggcgtggtgaacagcacgctgccggccgggcgctgcgcggtgctacgccatctcggatcgctggatgggctctcggaaagcgcccgctatctttacagcgagtggttgccggccagcggcgaggagctgcgcgattttccgctctatttccactaccacaacttcgtgcacgaggtggcggaatatgaactggtgaccgatctttatctgccgctgaaatagctgacatccggctccgcaaggagccggattgacgttaacaggacggcgacgaaccctgcggcggcagatagcgctgcggatctagcgcggtggcgcgatagcggatctggaaatgcaggaacaccgaatcggtgccggtgctgcccatggtgccgatcttctgccccgctttcacatcctggccgttgcgcaccaacgtggtgtcgttgtgcgcataggcggtaatgaagtcttcgccgtgcttaatcatgatcaggttaccgtagccgcgcagctggttgccgacgtacaccactttgcccttggcggaagcatagatcggctggccgcgtttaccggcgatgtcgatgcccttgttgccgccatcggcattggagtacgcctgcacgatccggccgctggtcggccagcgccagcaacgtgcggcgcccggcggcggcgtttgcttggcgatcgcggaggaagatgttttacggcgcgtggcggcggttttggtcggcgcgctgccgctcagccgcagcttttgccccacttccagattatagggcgggcgtatcttgttgattctggccagatcgctgacttcgctgtcggtgatccaggcgatgtaatacagcgtatcgccccgtttgacggtgtaggacttgccggtgtagctgcccttcggcagtttgtcgtagtcgcggttgtaggtgtttttacccgaacatccggccaacagcagccccaatgtcagacacaccgcgatgcggcgccacctcgccagcttgcttcctgtgctcaaatcctgtccccaatcgtcttttcggttctgatacgcctcagccgcacagtgtaacatttgcgccgggtcagtcaaaaacccccagacggtctatgctaaacaggtaaggatgactgattaattacccaacgacgaaatggagtactgtcatgttgaacctcgaccgcaataatctgccactcctgagcgaagaactgctcaaaaagcaacgcaccaccctgctgatcatcgccttcctgctgctggcgggcggcatactgtgcctggtcaaccctttcgcctccggcgcggcgttgagcatcgtggtcggcgtcctgctgctgttgagcggcgccgggctgattatcgccatgatcgccaaccgggcgcagaatacctggccgatgatcggcggcattctgctgggcgtggcctacctgattatcggctatgtgttcatcaccagcccgctggcgggcattctggcgctggcggtctaccttgccgtgctgttcgcgctcggcggcatcgcgcgcctggcggccggctatatgcgccgcggattgccgggcaactggctgcagttcgtcattggtgtactcgatttgatcatcgcctggatgctgatcggctcaggcccggcggcgtcggtcacgctggtgacggcgatcgtcggcatcgaaatgctggtcagctcctttgcactgttccaggcggcgaatctgtttaaacgcgcctgacgctaccggcccgccatcgcgggcctcatcgcttttgttgcttccagacaaaacaaggcgataccccctcggcttgtccgtggttatcttcatcggtaagtgccaatataggcgcagacaagggagctgaaaccgatgacaacccattccaacccgttgaactcgcgggaagtctgcctgcaattacgccatttcaatcaggtaatcgggcaacaatgccgcaatatggcgcgccaaaataccacctgcccgtgctgcctgacggacatcgccaccggttgcgacgccggaatcaaactgtgcggccagcagttggccaaacccaacccgcaaaccccgttattccggcagattcgcaacttgctgctcgatctgcgcgcagaagcgataggggttcacagaattgacgtcctaaaccgcaccaataacgaaatatcctggctgttgcgtgagctgtatttcgagacgttctgatcccgcattttgtcggcgccgctaaagcgaaagccgaaagcgagatacgggcttttggcgacgcgatcgtgttcatcaatcattagcgtcaccggctccacgccatacagcctgaactccgcgagcagtcagcgggaggagcccgtttaaaagcggctctggcaaaggaaacgtccaccggcgcggggttaaccggcggcagcggttttcggcaacacgaagtcaacccgccgattcttggcccggcccgtcggcgtgtcgttggaagccaccggttcagcctccccttttccccgttcactcagacgagatttttctaccccatgtgcgatcagccaaacagccaccgcacgtgcgcgtcgcagcgacagatcctgattatatttatcgctgcccaccgcatcggtgtgtccctcgatcaccacgttccctaccggttcggcagcgataaattgcgccacctgtcgcagcgcaggctccgctttagcagcaatcgcatcgctgtcgaaggcaaacagcacatcgctgcgcatcgataacgttacggcatttttgctgtctctgacggaaatgtcggcggattgtttagccaaatccgctgccttactctgcagatcaaggacgccggcattcagccccgaaggcaaaccaaccaaatccagccgggtagccttgagatcgagtatcaccggtttccccacggacgccggctctccgctgtcagcccatgaacccaatgacaccagcccaaaggctaacatcccacccacacaggcggctttcctgaggccgttcatcgctcaacgatccgtaatggctatcggcccgagcggctcgacgttggcgatcgtcaggtacacctctttcacatcaggtggaggcgcggggaagctgccaaaccaggtggcgacatagggaatgcctgagcttgagctgaatgacacgttgggagaggccagtgggacattattgctatcggtaagcagcaggtattttttattacccaccagaatgtagaaggatttctcaagactgcttttatccagactgctatacaagccttgtccattaaggttgtctttcaaccctttgaaacgcactttgatggtcaggatttcaccgtggcgcacggcctcggtcacttgcgcttcggctacgccgctgctgacgatcccggtagccaacggggtcacggggggatcctccgcgaacgccatgccgggaaacattatcgaagcaaacaggcaggaaatgacgaattttctgacatgctgcatgatcggagtccttattcaggagggagttgaagattgttctttcaacaatcaggcaattccactgcggtcactcggtcccggaattatagtaaagcacctcatattcatgagagttatccctgaaagcgtaaccttggtcacgttatgcttgcgcatgaactctcacccgtagtgcttattttgctgaatgaccggcttcatacaggcattgccttctgctcatcctctctgctgttcaccccactttacgaccgccgtcacacctcgctaccgctaaattgcgttggttatagagtcgtctacaattcaatcgaattaccccctacaacatcagaaattattattattagaggtgattatgttacagaaacacgaaaacgtaataagtatgactgtactaagcccgcaagccacccaacagctgatgccatcgttctcctccttgccccacacgcaacacgccgacggcaaatatcgcctgcgccgttattcggtcgttaaatacctcaaccccaacgtcgccgaagtggggccgcgcaccttcatgcagtcggatcagatcaaccacttccagggcaatgtggttcgccgcttcgaacctatcgacagcgccgtgttgcagagcgccggcatggcagagatgtgcaacctgtttgcagaaagcaacgaacttccggaaggcgccgagatagagatccaccagatgcgcgtggtcgccatcgagaaagacacccaggtggcgccggaaggcattcaccaggacggtttcgaccatatcgcaatgatcgccattcatcggcacaacatcgtcggcggtgaaatcatgctgtatgacgacagccaccacgaccctttctttaaaaaagcgctggcggacggtgaagccgtgctgctggcggacagcaaactgtggcacaacgccacgccgatcaacgccgtgagcccggaagaagaaggtcatttggatctctttgtcctcaccgcgcggggggagaaagcatgacctttacccccgagctcgcccgcgcccagttcagcgcgctgtcacagcagatcgacggcaaaccggccatctttttcgacggccccggcggtgcgcaggtttcacggggcgtgctggaaaaaatgaccgactacctgggaaggtacaacgccaacctgggcggccactatttctcgagccgggtcaccggcgaggtgatgggccaggcgcgggaatcggtgcgcgccttgttaaatgcgccgtcgcccgacaacatcgtcttcggcatgaacatgaccacgctgactttccatctcagccgcatcatcagccgcgactggcaggccggcgatgaagtcatcgtcaccgcactggatcactacgccaacgtctccagttggcagcaggctgccgctgacaaaggagccgcggtgcatcagataccgctggagagcgccgactgcgcattggaagccgcgaaagtgtgcgagcgcatcaacgccaacacccgtctggtggcggtcagctacgcctccaacgtcaccggcagcatcgtcgatatcaaaaccatcgtcgaagccgcgcatcgggtcggcgcgcaggtgtatgtcgacgccgtgcactatgcgccgcacaacctgattgacgtgcaggcgctgggctgtgatttcctggtgtgctccgcctacaagttctttggcccgcacgtcggcatggcctacatcgcgccgcagtggttgcagcgcctgcgcccttacaaggtcgagccggccaccgacgtcggccccggccgtttcgagaccggcacgcaaagcttcgaagcgctggccggcgtcgcggccgctatcgagtatctggcgcagtggggcacgcccggtgcgccgttgaggcagcgtttgcaggagagcttcgccgcctaccaccggcatgaagaggcgttgtgcagccacttcctgcagcggctgcaacaactcgacggcgtgcggctttatggcaccccccgggcggacagcgcgcgccgcacgccgaccttcgccctgaccttcagcggccacacgcctgacgcgatcgcccgccgcctggggcagcacaacatctgcgccggcagcgggcatttctatgcgttgggcttggtgcaacagctggggttgcaggacggcggcgtgctgcgcatcggcatgatgcactacaacactcggggcgagatcgatacgctgttcaacgtgatcgccgaagatattctcagttaatccggccatatcggcccgttcatcttattgagcgggccgaatcaagtatcaaactgcccgtcttttcttccaccgcgtccacggcgcacagatgcgtgcctttctttccccgcgttacgaaatgcggagataacgaacatataatgccggagaccggaatcggcgcatcgtgcggttgtcaccggatacggcggaggcagcacattgcgtgcattctcttttgactcggcagtgggcataatgacaaacacggtctggatcagatgagtatgaatggtgaagtcgcagcgcattacgttaaatgacattgctgtactggctggtgtcaccaaaatgacggtcagccgctatctgcgcacgccggacagggttaaaccggaaaccgctgcgcgcatcgccgccgtgatcgaggaagtcggctatcaggccgatcctgacaatcccgccctctattccaatagccctcccctcatcggcgttctggttccttcttttaacaatctgatatttgctgatgtcctcgccggcattgaatccgtgacgtctgtacagggttatcagacgctggtcgtcaattatgactacaacagcaaacgcgaagaggagcaaattgccgcgatcctggcttttaagatcaaagggctgctgctgaccgagtcggttcatagtctgcgggcggaaaaattcctgaagacggcaaaaatacccgttgctgaaatcatggggctgtcaggcaatgcagatcgaattaacgtgggttttgataatgtgaaagccggctacgatatgaccaccatgttgctggccagcggtaaaaaacgcattatctattttggttcaatgtctgatatccgcgatgaacagcgttacacgggatattgtcaggcaatggctaaccatgatttacctaccggtcgtatttcccccaataagatctcttccatttcaattgggacaggcatgatgacgcttgcgagccaaatgtatccggatatggatggtattctctgtaccaacgacgatctggccgttggggtgttacaggaatgcctggcaaacggtatcagcgttccagcgcaaattgccattgccggatttcacggtcttgagatcgggcagatcatcaccccccggttagccagcgtactgacgccacggtatgagatggggaaagtggcgacagaaatcataataaaaaaaattaaagggctgccgaccattgaacgtgtcgatctccacttccgcctgtcaatgggggagacaatatagctttccccgccagtcacttcagcactggccataattgcccgcttcgccagaaaaacatcactcgctatcccgaccagaaattcggccagatggcgccacccacctgaccgaacgcccccttaacgtgccttgcggcgccggagccagaataggaccagcagaataatgacgaccgccgcgacggccatgccaggcagaatcatcggctgtgcgcgcgccaacagcggtttcgggcccccggcgcgcacctcactcacgtcctcctcagtcacgctcagcgtgctgttgccgtatttctgcagcacgaagttagcgatatcggcaacctgcttatccgtcagctctccgacataggaaccggcgccaaagctcggcatcagtacgtgcttgccgtcaacccggcgatcaaccccctgcaaaatggcggcaatcaggtttgacggattgctcgcggccgtggtggagttgttgaatagcgaagggtaggcctggttcaaactgccgctgccgtccggctgatggcaactggcgcagtagccgctgtagagcgcctcgccgctattgagcgtgtggttggcgttgggcgaattcatgccgcggagatggggctcaacgttgtagtgcgcctggctaaggccattgccctggcgcccctcgccctgtgacggcacggtcttcaggtaagttgcaatcgcccgcagctgccggtcggtcaggtattggaagctgtgctcaacggcttcagccattggccccgcagcttgtgcgcgcccttccgcccgaccggttttcaggtagtccactaactcctgctcgctccagtcgccgatcccttcctggcgatcggcggtgatattcggcgcgtaccaagcccccaacgatgcccccatcaggaagcgcgaattgtcttccgccatcagcacattacgcggcgtatgacaggttccgcagtgagccgggccctgcaccagcgcagccccctcgttccacgcctcacctttcgtcacatccggggtgaaacgccgattgtccaaataaagcatgttccacaccgccatggagaggcggatgttgaacggaaacggcagatcggtttggcgcttggccggctcatcgaccggggcaacgccatgcatgaaataggtatacaacgcgtggatctcgtcatcactcagacgggtataggcggtgtaaggcattgccggatagagatacgtcccatcttgccggatcccagagcgcagaacctcggcaaacgccgcttcagaatagccgccgatgccgtattttaccgatggggtgatattggtggcgtagatagtgcccatgggagaagcaatgccgtaccccccggcaaaaggcttgccctgctgctgggtattcgtatggcaggccatgcagtccgaggcgatagccagcgcttgccctctagcgatcagatcgccgtcctgggcatgcgccgcgaagccgcttcccagcagcagcgtcgctgccagcgagtgggtgattttattcatttgctctccagggcgcgcagtacgtcattggccgccttgagtccaagcgccgccatcgtcaacgtggtgttgacaacgctggctgaaaccatggcgcctccacccgggatccaaaggttgtcatgatcgtgggcgcggcaattgccgttcaccaccgagttcgtgggatcgctgcccatgatcgtgccgcccataatgtggttgttggcattcagcttgtcgttaatcacaaactcttgcgcatcaaacaagtcgccaatctgccgtagctggattttgaccacttccagccctttgcgcacataatcgccgacgtcgtagtggatgtccgggcaggccaggccatgcttgtctttgcgggtagggctcagggtcagacggttgttcgggtccggcagcggttccaggctgatggagagatccaccgagcggctggcgcgatcgcgcacttcatcctgcagcgccttgccgaccttgcccgttttcaggacttcaagggcggaggggatcacccggttgatattgttgatgatgatcttgttggcggagtggtcgctgcggaacgcgccgtcacgataccccaccatgcagctgctctgcgccgggccgcggccaacccacagggcctctcgcgccaggaaggagcagtgcaggccagagtgatccatcatgttgcgccccacctgatccgagctgttcgcgatgccgttcgggttcttttcgttggccgccagcagcagtaagcgcgggttctcaatcccattgcaggccagaacgaacgttttaccgatcgcccgatgggagttatgcgccgtgtcgtaccagtgaacggcggtgacgcggttattgtcgtcggtgtcaattttgtacaccaccgcctcggggatcaccttcgcccccttgtgttcggcccgttcaacgtggtgaatgccgttgtacatcgccccgatagggcaaatcggctggcaattgttattgccgcagcaggtgggccgtccgttccagggccgggtgctgcggccttgcggaatgggcaccgatttaaaaccgtgaggattaacaatctcagcaatgcgtctgtcgccgtaggcccagggcaccatgtccatcgggtaaggcccgctgcgttccgcaggggactgccactccggattattcgggccggcaacgcctatttcctcttcggctttcgcgtaccacggttcgatatcttcgtaggaaataggccagtctctccccacgccatagagggatttcatgcgaaaatcattgggatggttgcgccagcaagaagcggcccagtgccaggtggttccccccaccacacgcaaatagccctgtttaaagcctgagccattggggccggtcagtttgatatagtcgttctccgggaaatagagcggcgcggtggcgtactccgattgcgggtaaagcccctgaaaatccgaccccgcacgattgtgcagtggcatattgcgccagttttccacagcctgtgcgcgctcaatgcgcgggcctgcctcaagcaccagcaccgagtagccctggctcaccaaagcatccgccatcagaccgcccacaataccggaaccgacaatgacgacatcggcctctgcatcgccggaagcattaattattgggcttttcacacgcggtcctcatattttttatcggctacggcaggcaaatctgttgcgggaatggaaggttggcgggtaacgcccggcggcaagccggtccaccacagcgggccaaaattgcaccaggtcggcacaatcagggcatcctgaaccgtgcgatacatcagcgcctctttataactaatcaactgaccctgctcagcgtttgaaggatctacggttccggtataccacgcggtcacgatcgcctggataagctccctctgcccctgttcaatcgcatgtcggttcaaggtttccgcatcggtggcttgctggctcaggatgaacagggcgttgagttgcgagttcaactgcggaaaatgttcgcgcagtgcggaaaaatagcgggcggagagtgtgacgtccaaatcgtcaaactcggtaatttttctcgaaatttgcaaaaattgcgcgtattcaacgggcgaggcggcaatttgcgcccgttcggcataggttatatttgaataaggcaacaggctggcggcgacgatgacgcccaccattttccccagcgcctccctgcgggtaagcacgatttgcaacgacattattagctccgaaataatttatttttatatagtttttttaatatctatcagaacgcaggcaaaccaaaataaaaaattgtgctaatggggaggaaccgcattaaaagatcaaggcgttatgagattggctacatcgactacagaggtaaactccggccttaatgatgtaatctgaacctgaagcaaatatccctgtaaataatacggcgtaatctctgccgtaaatttattcaacccaactcaatctttaaaagttaggggctatggctttgacgggaaaggcgcattcttcggaagcgctgcagacggcggatgagcaaggctttccgccgggcagcctgaagtagcgataccagccgccgctgaacgtcttgctacgtcagcagggcgccgtcgattttcgccacaattttacgcagaactgccggcgttgtgcaggtactcatcgggcgatgcagttcccccggaaagataacggccagttcaccgggttgcaggtggatgagagtctcaccggggatcgccgggctaaacccaaggtcgtgcgcctcgttaaatggctcactcaacggcaaaggcagccccagaaccccggcgccaatcacttctcgcccttccaggacaagatggatatccagatactggcgatgaaactccggcttctggtcggccaacagtttggtttccccttcaacgacgttaaagaacatctgtttaccctgcacctgatagtggccgacaggtaaattgtacggctcactttcaataatgctggccagcatttttcgaatggctgccggatagaatttattatttacggcagtggttaaggcatcaataatcataatattttctctggtagatatcgattcggtatttcaccgacaagaacaatggctgggtagttttatggcaacaggcaatctcggcgtaattacggtagaatcgctattcgatcgttctacgggcgccactatgaataagcaacaaagcaaaccgctttcttgttaatatttacagcctatcaccactgtgagtaaactccacctgaaaggctattcggcatggtgaaataagtcatgacctatctcacggtttttagccgcttaaaactgtgacaaaagtcacttaattaagtgttacgaaacgacgttacttatcctgtgatccacggcagaaaatcactggatattcaccgctctcaccaaaatcgatcgatttagccttctccccctacgggcataatgagttattttccccgatagtcactgacagaaaccacgaaattgcacacgagatcacgccagcagtaacatgcttttttaacactctttggcgtgatgcagatcgcaaaaataagcggtaaaaaaacgtctgatacagggtatcccctatttttcagacaggatcgcaacgatgcacactgacactcaacctaccattttgcttatcgcgccggtgatggatgctttgcaagccgcgttggacgcccgctaccgggtattccgtctctatgaacaatcagatattccagccttcctggttcgccatggcgcagacgttcaggcggtggtcacccgtggtgatgtgggggtaacccgagagacgctggagcagttgccgcaggtgggcatgattgctgtctttggcgtgggaaccgacgctatcgatctcaactacacccgggaacgccatatcagcgtcgggatcaccgccggcgtgctgaccgatgatgtggcagatctggctctggggctaatgctgtccgccagccgccgcctctgccagggggaccgatttgtacgcgaaggccgctgggaaacgacgccgccaccgctggcgaccaaagtgagcggtaaacgcatcggtattttcggcatggggaatattggccaagccatcgcccgccgggcgaaaggcttcgatatgaccatcctgtatactgaccgccagcgcaaagacggcctggattaccagtggtgcgccgatctgcatacgctcgcagcgcagagtgatttcctggtgatcgcggcatccggcagtgcggaaaaccgcgggattattgatgccagcgtatttaacgccatgcccgaacgcgcctggcttatcaatattgcccgcggcagcctggtcgatgaggcggcgctgataaaggcgttacaaaatcatgttatcgccggggccgctctggacgtctttgaaaacgaaccccatgtcccgacagcgttctttgctctcgagaatgttctgcttcaaccccatgtggccagcgctaccgtagaaactcgtcagggaatgagccaatccgttttggataatctggcaggttatttttcacatcaggatattcctgggttaattcaataaaaatgatcgtttgagttacgaataatcatttttatccgccaactcaatatcctctgtgaatggcggatatcatcgagacgctattatgaccgataaaataccaggaactcgctggctgcgggttatcgcgccgatccttatcacctgtattatttcatttatggatcgcgttaatatcagctttgctctgccgggtggcatggaacaggatttaggtattaccagccagatggctggcgtggccagcggtatcttttttattggttatttatttctgcaaatccctggcggacgacttgcggtttacggtagcggaaaacgttttatagcctggtcgctcgtggcctgggcgattgtctctatcgccaccggattcgtcacccatgaatatcaactgctcgtgctgcgttttattctcgggatctccgaagggggaatgttgcccgtcgtgctgaccatggtaagcaattggttcccggaaaaagaactggggcgcgccaatgcctttgtcatgatgtttgccccactaggggggatgctgaccgccccggtttccggcgcgattattgccactctcgactggcgctggctgttcattatcgaaggcttgttgtcggtcgtggtgttgactatttggtggctggtaatcagtgaccgtccggaagaggcgcgttggctaccggcgaaggaacgcgactatttattgaccgaactggcccgggagcgcaaagcgcgggaagggagggtgccggcagcgaaggcgccgttaaaagcggtgtttcgcaacaagggattgatgcgcctggtcgtgctgaatttcttttaccagaccggagactatgggtatacgttgtggctgcccaccatcttgaaaaacctgaccggtggcagcatggccaatgttggggtattggcgatcctgccgtttgttgccactctggcggggatttatgtgatttcgatgttcagcgatcgcagcggtaaacgccgtttgtgggtcaggatctccctgtactgttttgcggcggcgctgatagcctcggtgatcctgcatgagcacgtggtggccgcctatatcgcgctggtggtgtgcggcttcttccttaaagcggcgaccagccccttctggtcaattcccggacgcattgcggcggcggaagtggcgggcagcgcacgcggggtgatcaacgggctgggcaacctcggtgggttctgcggcccctatctggtaggcgtcatgatttatctgtacggacagaacgtcgcggtttgcgcgctggcggcatcgctgttgctggcaggaagtatcaccttcctgctgccgaaagaatgcgaccgctcctgcgaagaaacggacaaccgcctgccatccggggctaaacagaagtggagttaaacggcaatggcgcgctgtgggcagcaacggcggctcacacccgcatcaggattgggcggcgcgttgtattatcgcggttaaatgccaggccaatggcttgagcgactcacaagccaacccgcaccaaacggtgatgcaatcgttgagaatcagcttttctaaaaacggttataactcaatggggtaatgcatagggagattggagcgggtgaagggaatcgaaccctcgtatgcagcttgggaagctgccgttctaccattgaactacacccgcatcggtgtgcgacaggcattataaccggttatcggcgacgggcaagcggagatggcgcgtaactgtcgatgttttaagcggttaagtcccgtagacgaaaaaaaaccggcgcagttgcctgcaccggttgttgcacgctaaacgggattatttctgtgggcgcatcgccgggaacagaatcacgtcgcggatggtgtggctgttggtgaacagcatcaccatgcggtcgatgccgatgcccagaccggcggtcggcggcaggccgtgctccagcgcggtgacgtagtcttcgtcgtagaacatcgcttcgtcgtcgccggcgtctttggcgttcacctggtcggcgaagcgttgcgcctggtcttcggcgtcgttcagctcggagaagccgttgccgatttcacggccgccgatgaagaactcgaagcggtcggtgatttccgggttcacgtcgttgcggcgcgccagcggcgacacttcagccgggtactcggtgatgaaggtcggctgaatcagatggctttccgccacttcttcgaagatctcggtcacgacgcggcccaggccccagctcttctcaaccttgatgccgatggattcagcgatggccaccgctttgcccatgtcggccaggtcagccagatcggtttccggacggtatttcttgatcgcctcggtcatggtcaacttctcgaacggcttgccgaagtcgaacacttcgtcgccgtactgcacctgagaggtgcccagcactttctcggtcagggtgcggaacagggtctcggtcagctcgatcagatctttgtaatccgcgtaagccatgtagagttccatcatggtgaactctgggttatgacgcggagaaacgccttcgttgcggaagttgcggttgatttcgaacacgcgctcgaagccgccgaccaccagacgcttcagatacagttccggcgcgatgcgcaggtacatgtcgatatccagcgcattgtggtgggtgatgaacggacgcgcggacgcgccgcccgggatcacctgcatcatcggggtttcgacttccatgaagccgcgttccaccatgaagttacggatagcggacatcacctgcgaacgcaccttgaaggtgttgcgcgattcttcgttggcgatcagatccaggtaacgctggcggtaacgggtttcctgatccgccaggccgtggaatttgtccggcagcgggcgcagcgctttggtcagcagacgcagttcggtgcagtggatcgacagttcgccggtcttggttttgaacagcttgccgcgcgcgccgaggatatcgcccaggtcccacttcttgaactgctcgttgtacacgccttcagccagatcgtcgcgcgcgacgtacagctgaatgcggccgcccacgtcctgcagcgtaacgaaggatgccttgcccataatgcggcgggtcatcatgcggccggcgacggtcacttctacgcccagcgcttccagctcttcgttgtctttatcgccgtacgcggcgtgcagtttgtcggaggtggagtcgcgacggaagtcgttcgggaacgcaatgccgttctcacgcaggccggccagtttctcgcggcgggactgcagttcgttattgagatccagcgcctgatcggcgccctgtacttgttgttcagacatttctattcctcataacccggctttcaaacttgcctcaatgaatttatccaggtcgccatccagtacggcctgcgtgttacgcgtttcgacgttggtgcgcaaatccttgatgcgggagtcatccagcacgtaagaacggatttggctgccccagccgatgtcggacttgttgtcttccatcgtctgcttatcagcatttttcttttgcatctcaaactcgtacagcttggctcgcagctgtttaaacgcttgatccttgttcttatgctgagaacgatcgttctggcactgcaccacgatgttggttggcaggtgagtaatacgtacggcggattcggttttgttgacgtgctgaccgcccgcaccggaggcgcggtacacgtcgatacgcagatccgccgggttgatttcgatatcgatatcgtcgtcgacttccgggtagatgaacaccgagctgaacgaggtgtggcgacggccgccggagtcgaacgggctcttgcgcaccaggcgatgaacgccggtttcagtgcgcaaccagccgaacgcgtagtcgccgatgatcttgatggtggccgatttcaggcccgcgacgtcgccgtcggactcttcgatcacttcggtcttgaagcccttggcttcggcccagcgcaggtacatgcgcagcagcatgctggcccagtcctgcgcttcggtgccgccggagccggcctggatatccaggtagcagtcggcgctgtcgtattcgccggagaacatgcggcggaattccaactgatccagcttgctcatcagttgatccagttcggcgaccgcttcgttgaaggtctcttcatcgtcggcttccaccgccagttccagcagcccgccgacgtcttcgccgccctgctccagctgatcgatggtttcaacgatggcttccagcgcggcgcgctctttgccgagcgcctgcgcgcgctccggctcgttccagacgtccggctgttccagctcagcgttgacttcttctaggcgttccttcttggcatcatagtcaaagataccccctaagaaccgcagtccgctcggacaggtcctgaattcggttttttaccgggttaatttcaaacatggtttcgttcttttacgttgatgtcgtcgatggcggaatgccattggaaccgctaattctaacggatccgggcggcagtttatagcgagttggtcagtttttgtggcgatcgggaaggatgccggggattggagagcccaatccccgaattgtgttcaatttcacttcagcgcggccaaagatgctggatcagcagttgcacgttgcggttgccgcgaaactcgttgacgtcgagcttgtaggccagttccacttcgcgcacgctgctgtccggccacagcgtggtgtccacgttgaacgcgatgccgtcgagcagcgggccgccgccgagcggttccaccatcagcttcaggtgtttctcgcccaccagccgctgctgcagaatgcggaacttgccgtcgaaggtcggttccgggaacgcctggccccacgggccgccctcgcgcagcagctccgccgtggtcagcgacagctcctgcatcgccagttcgccgtcggaccagataaccccttccagcatcgccggatcgagccattcccccaccagctcgccgaaacgctggcggaactcgtcgaatttggcctcttccagcgacagcccggccgccatcgcgtggccgccgaacttcatcatcagcccggggttcagcatatccagccgctccagcgcgtcgcgcatgtgcaagccgggcaccgaacggccggagcccttcaggatgccgtcgcccgccggcgcgaacgcgatcaccgggcggtggaaacgctctttgatgcgcgaagcgaggatgcccaccacgccctggtgccattccgggtgatacatcgccaacccataaggcagctcggtgctggtgcgctccagctgatcgcacagctgcaaggcctccacctgcatgccctgctcgatctcgcggcgcgtctggttcagcgcatcgagatcgttggccagcatgcgcgcctgcgcgatgtcgtcgctcagcaacagcgccacgccgatcgacatgtcgtccagcctgccggcggcgttgagccgcgggccgagggcgaaaccgagatcgttggccgccagctggcgggcgtcgcggttggccacctcaagcagcgcgcggatgcccgggcggcatttgccggcgcggatgcggtttaacccctgatacaccagaatgcggttgttggcgtccagcggcaccacgtcggccacggtgccgagtgccaccaagtccagcagttccgccagattgggcatcgccagcgcgcgctgctcgaaccagccgctgtcccgcaggcgggcgcgcagcgccagcatcaggtagaacgccacgcctacccccgccagcgatttggacgggaaggcacagccgcgcaggttggggttaacgatcgcttcagccgccggcagggtctcgcccggcaggtggtgatcggtcaccagcacctgcatgcctttggcgtgcgccacgtcgacgccggcgtgggaggagatgccgttatcgacggtgacaatgagttctgcgccgcgcgccgccgcctgctccaccacttcagggctcaggccgtagccgtcttcgaagcggtttggcaccagataatcgacggctgcgccgcccatgctgcgcagcgccaacaccgtcagcgcggtgctggtggcgccatcggcgtcgaaatcgcccaccaccatgatgcggcggccgtcggccagcgcctgttgcagcaggctgacggcgtcgtcgataccgtccaactgttgccagggcagcatgcccttgacgctgcgttccaactcttgctcagcctgcacgccgcgcagggcgtaaagccggcgcagcagcggcggcaaactggcgggcagatgcgtgtcgtccgccgccgggcggcggcgtagttgcgttttgatactcaccggcgattaaccaccggctttggtggcggcctggtgcgcatccagcatggcggccatctctttcggcccctgatagcccgggatcatcatgccgttttccaggatgatggccggcgtgccctgaatgccgaactgtacgcccagctcgtaatgcttgctgatgtcggttttacaggtcgccggagaaacggcgtcgcccttcatggcggcgtcgaacgccttggccttgtcggcggtgcaccagatcgactgcatgtctttttcagcctgggatgccagcccctggcgcgggaatgccaggtaacgcacggtaatacccagatcgttgtactctttcatctgctgatgcagcttgtgacagtaaccgcaggtgatgtcggtgaacacggtgatcacgtgtttctctttcggcgccttgtacacgatcatctgatctttcagcgcgtccatcttgctgctcagcagttggttggtcacgttgaccggctctttgccgctgacgtcgaacagcgggccctgcaggatgtgcttgccgtcttcggaggcgtacagcacgccgctgtcggtcagcacggttttcaggccgttgaccggtgaaggctgcacgtccgcctgctggatgcccaggctggcgagcgcttttttgatcgccgcgtcatcggcatgggcggcgccggccaccgaggccaccagcagtgaaagcagcattaaaccttttttcattattccaatcctttcgaacccgccgctcaggcgcgcgggtgatgctgttgatgtagctgtttcagtcgttcggtcgctacatgagtataaatttgcgtggtcgagagatcgctgtgccctaacaacatctgtacgacacggagatcggccccatggttcagcaaatgggtagcgaacgcgtgccgcaacacgtgcggcgacagacgctcgctgtcgatgcccgcaaggatggcatagtgtttgatgcgatgccagaacgtctgtcgggtcatttgctggcagcgggtgctggggaacagcacatccagcgtctggccgttgaccagccatgggcggccgtgctccagatagttttcgatccagtagaccgcctcttcgcccagcggcaccagccgctccttgttgcccttgccgatcacccgcaccacgccctgacgcaggctgacgtcgctgatgttcagccccaccagctcggaaacccgcagcccggtggcgtacaacacttcgagcatcgccttgtcgcgcagctccagcggctgatcgacgcagggcgcctgcagcaacgcatcgacctgcgcctcgctcagatccttcggcaagcgctgcggcagtttgggagacgccagctgcgcggtgggatcgtcggcgcgcagcttttcgcggtacagatattgaaacaggcgcctcatggcgctcaacaaacgcgcggagctggtggctttgtaaccgccatccacccgctcggcgagaaacgcctgcagatccagcgcctgcgcctgcagcaaatcggtcttctgctggccaagccaggcgcccagggcctgcaaatccagccgataggaggccagcgtattttccgccagattgcgctcaagccacagcgcatccaggaattgttcaatcagcgcattgtcttgctgttgcacgcggtcctctctttgttgcatttccacccgcgccattatgccttaagccggcgcaaatcaggtatactcgctgcaattctctaaacagcaacgtaacggtttacacatgaagattggtctgttttacggctccagcacctgctacaccgaaatggcggcagaaaaaatccgtgagattctgggtgaagacctggtcgacctgcacaacctgaaagacgtctcacccaagctgatggaggactattccattctgatcctcggcatcccgacctgggatttcggcgaactgcaggaagactgggaagcgatctggccgcagctggcggcgctggatctgaaaggcaaaatcgtcgccatgtacggcatgggcgatcagctcggttacggcgagtggttcctcgacgcgctgggcatgctgcacgatcacatcgcgccgttgggcgtacagttcatcggcttctggcccactgagggcttcgagttcaccagccccaaaccgctgagcgccgacggcaaacacttcgtcggcctggcgctcgatgaggtcaaccaatacgatctgagcgaagagcgcctgcagcaatggtgcgaacagatcctgttggaaatggagccgctgctgtagccgctatcgggcgtttctccccaaacgccgagcgccggcggcatgattcgcgccggcgccccctatcagccttgttcgccgtcacccgccggcggatacagcaacagctgccgcaggtggcgccattcctctttgctcatgcagtcggaagccagccacagccggcggcgctttttgccttccatcggctgcagcgtcaacagcatgccgtaacccggcatccacggttttttcgccagccgccactcgcggccgtgccagctgaaacgccgatccgccagcagccgcagctcgccctgcaccgcggcgatgcgcttctggctgcgaatgcactgaaacaccaccagcgtcagcagcaccagccagagcgggccaaagccttccggccagggcgaaatcaggatcagcaggatcagaacgccgtgggtcaacagtgaaaacagctgggtgcgccaggaaatgcggatatcacatcgccactgggccacggtctttatttcgcgtttggatcagggtcaccattctctgcagctcgccgtcctgcggcgcgccatgattcatcagccagttgaacaaatcgggatcgtcgcactccagcaggcggataaacagcgccttgtccgcatcattcaggctgtcgtattcgtattcgaagaacggcatgatggagatgtccagctcgcgcatgccacggcggcaagcccagtgaatacgtgctttgttgttaatatccatgttgttatgactcacctcttttcagcgcggcagcgccagcgcagggttcaaatgacacactgtatggcaacgccgtcgcaatataattccatcaaccggggatctgtctgcaagggtgccctggccgcaagcctatagagtaacaatttgacatacacgccgggaaggcgctttgtggcggaaaacgcaataaagcgcaaaatgccaaaaaaagcgcaccccggcgccgcggcgcgaataacagtttgcaaagcccgtcgcctcttttaccatgggtccaatacccttcaggtaagctaaacgttgagcaggaacttactatggcgcataacattccattcccaccccgtcagccctccgcttccacccatctgcccctgacgctgatctcgctggaagattgggcgctggtgacgctgaacgggccggacacggtgaaatatctccagggccaggtgacggcggacatcgacgcgctggcggccgatcaacacgtgctgtgcgcccactgcgacgccaagggcaaaatgtggagcaacctgcgtctgttccaccgtggcgaaggcttcgcctatctggagcgccgcagcgtgctggacagccaactggcggaaatcaaaaaatacgcggtgttctccaaagtcaccatcgccgccgataatgacgcggtattgctgggtgtcgccggtttccaggcgcgcgccgcgctggcgggcctgttcgccacgctgccaagcgctgagcacccggtggtgcaggacggcgagaccacgattctgcacttcaatgcgccggcggagcgttttctgctggtgacccgccccgccgtggccgaacagctgatcggcaaactgcatgaccaggcggaacggaatgacagcaaccagtggctggcgctggagatcgaagccggttatccggttatcgacgccgccaacagcgcgcagctgatcccgcaggccaccaacctccaggcgctggaaggcatcagtttcagcaagggctgctataccggtcaggagatggtggcgcgcgccaagttccgcggcgccaacaaacgtgcgctctactggctggaaggtaaagcggctcgcgccccgcaggcggcggaagatctggagctgcagctaggggaaaactggcgtcgcaccggcaccgtactggcgtcgagccagttagccgacggtacgctgtgggtgcaggtggtgatgaacaacgatctggatgccgacagcaagctgcgggtgcgcgacgatgccgccagccagctggcgatcaaaccgttgccctactcgctggccgaagagaaataatccgtcggccgcaggccccctgcctgcggccatcttcgttactcgtccaactccccgtcgcgctgcaccagatagatcagcaccaagatgatggtgacgaagaagcgaaacgcgctcggcacgccgttccattgctgcgacatccacatgccgaaccactcccctccaatcgacataaaaccgacctgccaggtaaggaagcccagcgtcagccccgctaccgcccattttttgcggccgttgaaggcgttggcgggcagtttcaggccgcacagcaggcgcaggccaccaatccagcacagcagcgcggtcagactctccaacgcaatgatgaaaatataaccggcgtgatgcagccacggcgtctgtatcgagcggtagccgatggtggcgtcggggaaaagggtatccatcataaagacgtggcgcacgaaggcgaaattggagccgtagtcggtgaggttgccgaaggcgaccagcgaagcgaacaaggcgatagcgcagatcagcagcgctttggataagcgaacgatcatcttggtgagtcctgaacagaggttaaagaaacggtatgcgggctcagaaatgaaggaacgggcttgctggatacccgaaagaagcaagcgcctcttttttaaaacaaaagaggcgctagttcaatacgcattcagacgtagcggcaacgcttagacgtacaggtagatcgccatgaagtggcaggcgctgccgccgagcacgaagccgtgccagatggcgtggccaaagcgaatgcgcttggaggcatagaaaatcacgcccagggtgtagaccaccccgccgatcgccagcagcgtgacgccgccggcctccagccgcgtaaccagctgataaatcacgatcagcgacagccagcccatcgtcaggtaggtcaccagcgacagggcttcaaaacggtgggcgaaggccagcttgaacagcacgccgagcagcgccaacccccagattaccgccatcaggcccttcgccagcggcgaatccagccctaccagcaagaacggcgtgtaagtgccggcaatcaggagataaatggcgcagtggtcaaattttttcagccaatgcttggccttttgatgcgggatcgcatggtacagcgtagaagcgagaaacagcaggatcatactgccgccatacaggctgtaactggtgatggccgtcgcatcggcgccggtattcaccgcctgcaccagcagcaataccaggccgacgataccgaacaccagcccaatgccgtggctgatgctgttggcgatctcttccgcccacggataagccgcggcgacaatcttattgttcccggctttcactacgtccgttttccccataacgcgcaacccctcaaaatgccctgctttgtgcgaaattaacgcaaagcagcttaactgagaataattccagtgtacacgtgtacgctaaaataaaaatgtgaacgcgtgtaaccatcgaaatcccccgcccgctggtctacaatcgtcaggcttcaacccacccaccttgaggtttacaccatgtcatccgctgtacccgcgttagatttcggttcaatgacccaggccatccagttcctgatggaaatcgataagttgaaaggcgtgcaacgccgcaccaaggtactgggcacccagcgccaggaaaactccgccgaacacagctggcatttcgccatcgccgccatgagcctggcgccctacgccggtgatgacgtagacattcagcgcgtgatccagatggcgctgctgcatgacatcgtggaaatcgacgccggcgacgtgctggtctacgatctggcggcccgcgcggcgatccacgatcaggaagtggcggcggcgcgccgtctgttcggcatgttgccggaggctcagcgcgagtatttcaccgctttatggcaggaatatgaagacggcgaaagcgccgatgcgcgctttgccttgctgctggatcgcaccatgccgatgctgatgaatctgcacaatgaaggccagagctgggtagaaaacggcatcagcctggagcaggtgctggcgcgcaatgcgtcgatcgccgacgtgcatcccgagctgtggcgccatatggagcaacatctgcgggacgcgcagcgcaaaggctggttgaagtaagggagccgggctgccgcctctgcgccgcagcccgtcaacgtcaagcgaacgcctgctggcgttccaacgcctcctcataactcggcatcgatcccgccgccccggcgcgttccacgcagaccgccgcgtaggcggcggcgaagcgcgccgcatcggctaacggcacctgattcgccagctgcgccgccagagcgccgttaaacgcatcccccgcgccggtggtgtctttcggctgcgccggaaacgccgggatcagctcactgttttccccgtccgagaacaacgctccctgcgtgcccaaggtcacgatcagcaaacgaatgcccttggcgtgcagcacctgcgccgcctgacgcgccgaagccacatcccgcaccggcacgccggtcagcaatgtgcattcggtggcgttgggcgtcagcagatcgacctgcgccagcaggctgtccggcaccggctgaaacggcgccgggttgagaatgatgaacgtccgcgcctcgcgggcgatggcaatcacttgttcgatcgccggcaggttgttctccaactgggtcaacagaatatccgccgcggcgatcgccgggcggcactggcgcacctcgtcctcgctgaccgtcaggttggcgccgggatcgacggcgatcatgttctccgcatcctcgccggcaacgtagataagcgcattgccggtcgggcaatcgccggtcgagaacagcgtcaccgcatcgaagccggccgcggcgagatgacgccgggcgaaggtgccgaagtcgtcgcgccccaccttgccgatataatgcacccgcgccccggcgcgcagcgcggcggtggcctggttggcgcccttgccgcccgcccccatcatactgttacgggcgatcagcgattcgccgggctgcggaaaccgcgccataccggcgacgatatccaggttgaacgaaccgaacacgcagactttgcctttcattgctggtactccctgctcaattggaggtggcgccgggcggccagacaggcgcctttgctgccggtttcatcggtcaggcggctgatggagatcgccaatccctgtgccggctgcggcccgcgcagatgacggcggatctcttgctccagccgcgccaacggaaaaccgcgcatggcgatcacgccgccgcccaggatcagccgttgggggtcgatcacgttcatttcgatggcgatggtctgcgccaatcgttcaacgaaacgccgcaaatccggatggtcgccatggcgttcgaacagccggtcgaacggcgtttgcgccgcgttggcgcgcgcccagccggtcagccaatggccggaggtcaaactctcgacgcagccccgtttgccgcacgggcactcgcccagatggcccggccagggaatgtgccccaactcgccggcggcgccatgcgccccgtggtaaaaatcgccgttcagccacaggctgttgcccatgccggtgcccagatacagtcctaccgccacctgcggcagcgccggcagctgctgcaaatcccaccacagcagatggttgacgtccttgtccattcgcaccggcagcgccagcaaatcggccaacagcgccgccaccggctgggcatccagcgccggaatgaacggcagcgacagcacccgcgagcgatcgcggctgaggatccccggcagccccagcatcacctgcgccacctgacgatcctcgcaatgccgggcgataagatcgcccaacgtcgccagcggatcggcccgctgcgcccaatcggcggtcgctatcttgcggtaaccgctaaactcgccttcatcatccatcaacagcaggcgggtattggtgccgccgacgtcaacgccaagaaaataccgcatcatatcccccgcctcaggccgcctgccgcatctgatccagcatcttttcccacgccgtttccagatccggatcgaggttgaacagcccggaactgccgacgatcaacacttccgcgccggcgcccatcagatcgcggtaggtacgctggttacaggatccatctatttcgatcagatagttcagatcctgttggcgtttcagatcgcgcaactggcggatcttgtccagcatttcgggaatgaacggctgcccggcatagcccggatcgacggtcatgacggtgaccttgtccagcaggtgaaggtagtggcgaataaactccaccggcgtggccgggttcagcaccacccccacttttttgcccagcgcgcggatttgattgatcacgcggaacgcgtcgcggttgatggtttcggcgtgcgggcagataaagtccgccccggcgcgggcgatcggctcgataaaatcggttgggttctccaccatcaaatgcacgtccagcaacaacgaggtatgcgggcggatctgttcgataaagaacggcgacagcgtgatgtttttaacgtagtgcccgtccatgatgtcgatatgcagcatatcggcgcggcgattcagcaccgccaattgctgccggatatccatcaggttcatgcacatcagtgaaggtgaaatctggtatttcattagcgttatcctgcgcaaaagggaaaagggatcagtggcccgccgcgattctggcctgggccgcgctgcggcgcatcgcccgccgctgctgatagcgatggcggaaaaacttcagcgccagcaccgcgatcagcaccgcgccccacatcgccagactgaaatgcgggctgacgttcatcaggttcaaaccggtcgcgatcacctgcagcacgatcagcgccaacaccacgccgctgacccggccaaaaccgccgaacggatcggtgccgcccagtatgatcgccagcaccgtgagcagcaggtaggagtcgccgtaacccatgcgcgccgagttgaagcgcgccatcatcatcagcccggcaatgacgcacagcaggctggagagggtgtaaatggcgatcaacacccgatgggtattcacgccgctgaagtgggtggcgttgatgttgctgccgctcatgtagatgcatttgccgagccgggttttctgcaagaacagcgccagcaaggcggcgaccaccaggaagatccacagcggtaccggcacgcccagcacgcgctcggcgccgataaaccgcacgatctccggcatgccgctcagggccgcgccgcgcgtcaggtaaatgccgatgccgttgaccgtcgtcatggtggccagcgtcaccagaatcggatgcgcgccgacgtaggccaccaacgcgccggtcgccgcgccgataagcccggccaacagcatcgccgccgccagcgccaacgccagccacagcgcctgcaagcccagcccggcatccgccggcaggtagctgatgaacagccaggccatcagcaggctggtcaggttggcgctggcgataatgcacaggttcaggccaccgctgaggatcgggatgaacatcgccagcgtcagcaggcccagctccggcagttggaaggccacgctggtgaaggtggcgccgctgaagaagcgccccggcatcagcaggctaaagcccagcaccaccgccagcagcaatgccagcagaccgacggcgaccccgtccggacgaaatttcaggttgttgcccatcaggcgctcctcaggcgaaaccgacgtcggtttctttgcgtttcttgtagtgagtgacggtgatcgccgcgacgatcaccagaccgatcaccacgttcatgaagtagctggacacgccgatcaggttgaggccgtttttcagcacgccgatcaggaacacgcccatcagcgtgccgaccacgctgcccttgccgccgttcaggctggcgccgcccagcaccgccgccgccagcacgtcgagctccccgcccaccagcgcgttgggcaccacttcccccatgcggtacacctgcaccaggccgccgatcgccgccatcgcgcccagatagccataggcgaacaaatgcagcaggccaacgcggatgccgatgcgccgcgccgattccgcatcaccgcccacggcaaacagctggcgcccgaggtgcgttttgttcagcagcagccaggtcagcagcgccaccgccagcatcaccagcgtcggcaaaccgagctgatagctctgctcatccagctggaacggcagcacgctgcgcggcagcgtccaccagtccggcaatgcgtacaggctgcggccgttggtcagccacatcagcatgccgaacaacaacgcctgcatgctgatggtgacgatgatcgagacgatgcgcaggcagtagatcagcagcgcgttgaccatgcccagcgcggcgccgatcgccaacgccagcagaatgctgcccgccgggctggccaggccgtagtgggtcgccagcgtggcgatcaggtactgcaccaccgaggcgactgcggcgaaggagatatcgatgccgccggtcaccagcactacaaacaggccgagggcgaaaataccgctcaccgcatagctttcgctgagatcgagcaggttttgcaccgttaaaaaccgatcgctgagcagtgaaaagaccatgaccgtcagcagcaacacccaggccagatagccttcgttgccgcgcggtttcaaactgaatctacgcattgaccgcctccgccagctgttgctggctcacctgccccggcaggtattcaccgatcacgctgccgccgctgaagtgcagcacccgatcgcagttgtaatacacctccggcacctcgtcggagatcagcaaaatggcgatcccctcctgcgccagcagatggatcagttggtagatgctggccttggcaccgacgtcgacaccgacggtcggcgagtcgaggatcaagatccgcggctgggtcagcacccacttggccagcacgatcttttgctgattgccgccggacagcgtcgaaaccgcctgatccggatccgccacccgcacgccgagcttggcgatccactccgcgacgatgcgattcttgcggtagtcgtcgatcaggcgaaaacgcccgcgcagcttatcgagaatggtcagcaccgcgttatccgccaccgactgttgctgcaccagccccagcgtcaggcgatcctccgagacgtagccgatgccggccttgatcgcgtcctcatggccgcgaaagcgcaccggtttgctgtcgaggtagagtttgccgctgtccggccgggtcatgccgaacaggctcagcgccagctcggtacgcccggagccgagcagcccgcacagaccgagcacctccccctgatgcagacggaaactcacatcctgatactgcccagcgcggctcaggcgatccgcctccagcatcacccgatccttattcaggctgggcgctttcaggcgatagtccagcttcagaccggtcatcagctcggtcagacgatcgccggtgatctccgccgccggccaggtgccgactttgtggccgtcgcggatcaccgtgacgcgatccgagatctccagcacctcgtccagccggtggctgacgaacaccacgcagatgccctgcgctttcagatagtccaccgtgcgcagcagttggttgacctcggtgcgggtcagcgaagcggtcggttcgtccatgatcaccagccgcgcctgcgccaccagcgcacggcagatcgccacctgttggcgctgcgcgatcggcagctccgccacccgtttgtcgagatccagattgaaactcagcgattgcagctggcgttcggcggcgcgccgcagccgcgccgggcggtgccaacccagcaacccgcgcaggttgtgttcgaaggcgatgttttccgccaccgtcaggttgggaaacagcgacagatcctgatagatcacctgaatgccgaaggcgcgcgcctgatccggcgacagccggccgaaggtttgcccatcgagggtaatgcggctgccgtcgtccggttgatagacgccggcgatcgccttgatcagcgtgctcttgccgcagccgttggtgccggccagacagtgcacctcccccggcatcagcgccaatgaaatatcgttcagcgcacgctgcccgccaaaggtcatcgacagctgttgcagttcgataagcggcgcgccctgcgttgccgtattgccggaaatcgccatgattacagccccattttcaccagcttcggcaggttttgcttatccaggctttcggtggcgttgccgagaatggtgtgctgctgcgcatccacctgcaccttgcccatgccttcgatggtcatgccgtcggtgattttctcccccttgtgcatcatgtcggcgatgcgcacgaacacttcgccggccaccatcggattccagatgtaaccgcccttgatggcgccgcgattgaccagcgaagcgccctggcccgggctgaacggcccgatgacgcagatatcgttgcttttgccgcggttgagcaccgcgcgcccggcgccgatcggcccctgcgagccgaacgccagtacgcctttcagatcgggatacttggccatcagatcgttggtggtgcgcacgctgtcatccagcgattcccccacgccgaacttgtcgcccaccagttgcatgttcgggtagtgctgcttctggtagttgatggccgagtccgaccaggtgatgtgcagcggcaccgtcaggctgccgacgtataccgcgtacttgccctgctctttcatgcaggcggccagtgctttcatgtggttgaccccgtgctgcgaggcgtccaccagctcaaaatcccagtcggcgtacttctggccgggggattcgtgcacgatcaccttgatgcccgcctcctgcgcgcgcttgagcaccggctccagcacccgggcgtcgttcggcaccacgccgatgatgtccaccttctgcgcgatcagatcctcgatggcgcgcacttgcagcgccggatccgccgccgtcggcccaaccatccaggcgtcgatgtcgcgtttggcgctctcgcttttgatgccggcctccatggcgttgaaccagggaatgccgccgatcttcaccaccacgcccattttcagcttgtccgccgcctgcgcggagaccgacagcagcagcgaggcaaacagaccgaccagtacggattttttcattgttctctctccacaagtgttggctgtaataagggttttcattgttgttatcgcgccgcccttttcgcggcgggtgaaacttcaatcacgtcgacgttgttccaggccagttcctgacgaaattcgtcgtcgctgagcctgtcggtgatcagcgtgtctatttcccggtaatggcaaatgcgggcgaacgagcggcggccgaacttgttgctgtccaccagcaggaacttgcgttccgacgccagcagcatctgctgcttcagccgcgcatggtgctcattgctttcgcggatgccgccgtcctggcagatgccgtggcaggagaaaaacagcttgttgatcacgaactccttcagcatctgctccgccagcacgccgataaaatcctcgtacttggcggaatactcgccccccaggccgatggtgcgcacgttggccttgcaggccagcgtctggatgatgtgcagcgagttggtcagcaccaccagcgagatatccggcagttggcgcgccaaaaaccaactggtggaactgctgtccagcagcaggcagtcccccggcgcgataaattccagcgcgcgtttggcaatgcgcgtcttctgttccggcgcctcgttgctgcgctggcggaaagattccccctggtctatctcggcgggcacataggttttctccaccgccggcggctcgacgaacaccgcgccaccgtggctgcgcagcagcaggccgcgccgttcaagcaaggccagatcacgccgcgccgtctcgatagagatgtggcacagctgcgccacctcctgcaccatcacgcggccgcgctggctcaagacttcggtgataaagcgatgacgttctacaggcagcatgtttcttttctcctccacaacgttgattacgatatcgatttgccgcgtcgcgttttgcgcgcggacgcaaagcgcatcgccctgcgatcggtcaacgatcgcgatgtgatagttgtcaaaaaaatcgggaaggaaatgaaatgaataattacgaaagtgtggagtaacaggcagttatgatgcgcgtacgcctgaggtaaacaggagagaaacggtaaacggtcacaattccacgctccacagcatgaccgttaatgaccgtttgtgtggttttgaccgagcgtcacaattagaccgccggcgttgataacgcattacctgaaaaaacggcaaaaaaaatccggtgagaacctcaccggatcgttagccgcctggcacacattattccccgtgttcatgctctttcaacatcgcctcacgcaacacggcgttcaggcgtttctgatagcctttgcctggccgctgaagccaggccaacacatccgcatcgatgcggatggttttcgatactttcatcggtttataaaaacgcccctgaaccgcagcctgccacttttcctcatccagtgccggcgcatcggcataatcgatgtcctcgtccggcaacgcactcagtgaagcaatttgcgctttctgctcctccgtcaacggcgggagtacgctatgggccagatttttggcggaatttttgcgcttcatctcttcccctctctttggcatcggccttgcgtgctgaaatgatacgcacgatctctactgtatcgccttcgacatccgtttcgatcgtcgtatgtgccaccagcaacagcaagcaggatccgaccatgccgatcgtttgccaacgttcttctccaccctcgatcctttccaacacagccaaatggttgggatccagaaaaacccgttgcgcaatctcaaaactgacacggtgtttgcgctggttactgtgatttttatcctgattccattcaaaataaacatacatttttgtaactacattttgattgttatttaatcaaaacacctcgcatccagagggatgtcaaaaccctacggatgcgttcaacgcccgcctgcggcctcgataaaggtgccggtcacgtaagatgcggcgtcagacagcaaccaggcgatcgcctccgccacttcctgcggctggccgccacgctgcatcggcaaactgtccttcacgcgatccacccggccaggctcgccgccgctggcgtgcatctcggtatagatgaatccgggccgcacgccgttgacgcgaatgccctgcgccgccacttcccgcgataacccgatggtcagcgtatcgacggcgcctttcgaggcggcatagtcgacgtactctcccgccgcccccagtcgggacgccgcggaggaaacgttgacgatggcgccgccccgcccgccatagcgcagcgccatgcgcttcaccgcctcgcggcaacacaggaagtaaccggtaacgttggtgccgagcacctgattgatgcgctcggcggtcaactgttcaatgttcgcctgctggaacagaatgccggcgttgttgaccagcgcactgagcgtgcccagcccggcatccagtgcgccgaacatcgccatcacctgcgcttcgtcggccacgtcagcctgcaatgccagcgccttaccgccctgcgcctcgatctccgccaccacctgccgcgccgcactttcgtcacgcaggtaattcacgcccaccgcatagccctgccgggccagcagcaaagcggtcgcgcggccaattccccggcttgcgccagtcaccaatgccactttcgtcatcgtattttttctctggttggcgatataaaaataacggcctgcgcacaggctccccgtttgccagtcagagtatagagcggcgctctagaaaacgcttcagagctgagccaggcggcgcagcagctttttaatccgatatttcgcgcagccggaggcgtccgttaccgccacctgatggccccgctgcaaaccggaagcatgcaggcctttgtgagcagggctgtgcacatcgccgcgaaacgacagcatcaacagcacgagcagcatcgccacgcctgaatacatcagccgccgcgaggcgcccgcgagcggggaaccgtcagtctgcatgtttcgctccctcagccatgatttcgaatggcagcaaaataactgaaatcccccctcgttcccttaacgcgagattaaagccagattaaggtttgcttaagaacgtgcaggcagcgcaggtttccccgttgtcttcccgtcagcgttatagttagataagcgcgactcaaggatctcagcggaaataacgtgaacatactgttggtggaagacgacctgcaattaggcaaggcgctgtgccgagcattggagctggccggctttaatttgtgctgggtgcgcctgctcgtcgacgcggaaaataaactttcatccggcgggttcgatttgatgctgctggatctcacgctgccggacggtgacggtttgcagaggctgatcgcctggcgcgccgccgggcaaaatatcccgatcatcatcctgaccgcccgcgaccgcattgaaagcctggtgaacagcctggattccggcgcggacgactttctggccaaaccctttgcgctgcccgaactcatctcgcgcgtcaaggcggtcaaccggcgcatggcgggcttcgcgtcacaaacctggagcctcggcgcgctgtatctcgatccggtcaaccatcaggtcatgctggataacgaactgctgatgctgtcgaaaaaagagtatcacctgctgcacgaactgatgcgctgcgccggcaccgtggtgcgcaaagcggtgttggaacagcggctgttcggccacggcgacagcgtggaaagcaactcgctggaagtgcacatgcataatttacggcgcaagatcggtaaagaaagaattattaccgtacgcggcattggttatttgctgaagaaagagtagcgaaatgatcggtttcaaatccttctttatgcgcaccattattttccaggtgctggccattttattattgtgggggatcctcgtcgcctgggtgaaatattggtattaccccgacatggagaaatatttcgataaccagcaacgcatcgtcgctgcaggcatcgccaatattctcgacgaaaccggcactgaccatatcgattaccgcggcatcatcaagaccattgaaggcatgtacattgattccatcaataacggcatgcaggatgaaatcgactatcacccgctgtttgtggtttacgatcgagacaaccgggtgctttacagttcgcaaacgcagggagagccgctgcgcctgccgccttcggtgctgtccggctcggtcaattacgccggcgccaactggcatctcgccggcagctggagcgagaatcgccagtaccgggtgatcgtcggcgaatcgttcaacgatcgcaccacgctgttcggcaacccggcggagagcaccgccgtaccgctgctgggcattctggcggccatcatcatcaccttgctgtttacggcctatttcagcctgcggccgctgcgccagatcgcccgaaccatttccgatcgtcagcccggcaatctgtcgccgatcaacgtcagcgagcagtatcaggaaatccggccggtggtggtggaggtcaataagctgatggcgcgcatcgacgccgccaatcagcgcgagaaacgatttatggccgacgccgcgcatgagctgcgcacgccgattgccgccgtgctggcgcagctgcatttgctgacccaggtcagcgagcagcaggagcgccgggaaatcatcggcgacatgcagcaagggctggatcgggcggcgtcgctgtcgcgccagctgatcaacctggccaagctggaggcggaagattttccgctgaagattgaggcggtggacatctacgccgaaattggaaaatgcatcgcgcagcacgtcccctatgcgctggaaaaagatgtcgaactgtcgctcgacggcagcgaggaggtggtggtgagtaccgaccgccatgcgctgatcgccatcttcaccaacctgctggacaatgcgctcaagtatgcgccgcccggcagccgcatcgaagccaatatccgctcgctggcgccactcggctgctatattacgttgcgcgacaacggccccggggtgagcgaagagcaccttccgcgcctgtttgagcgcttttaccgcgtgcccggcacgcagcagaccggcagcgggctgggattggccatcgcccgcaacctggccgacaaaatcggcgcgcagctgcgcgtcaccgaaggtctcgacgatcgcggcatcggctttatcatcgatttgccggaaagttaccggccacagattgagagttaaccacgagcatgatcgcccctgtactgctgcaacggcagcaactcgaccggctgtgggatatcgaccgcagcgaaattatcgacaccctgtatcgcctgcaggacggcaagctacacccctatccggactactacgatgtgcgcggctgggatccgcacgatcgggaaacctatacgccgatccacgaagcgtgcttcgatcgcggcggcgcgttcttcgcgctgttcgaaggcgaggagatcgtggcagcggcggcgctggacaccgaaccgcgcggcccgcggcaagatctgcgccagctgctgttcttttacgtcagcgcgcaccaacgcggccaggggttaggcaagcagctgttccagctctgtctgcggcaggcggcgcaagaaggcgccgccgggctgtacgtctcctccattcccaacaaaagcaccgtagacttctatctggcgcagggttgccggctcatcgaacatccggataccgaattgttcgcccgtgagccggaggacattcacctggtctgcctctgccgctagcggccggggcttaacgggcgatgcgtatcaccgaacgcacgtcgcttttcttgttcagatcccacacctcggcgatctccgccaacgcgtgctcctgcgtctcgatagtgagcgctccggtcgccgccagcgccaaaatctcggtcgcgtagcgctgcatctccgggatcggcgggaagttgccggtgccgctgccgaggatctgcagctgattgctgcgcagcaccgccgccggcagccggatgtccggcgcggccatcgagccgacgttgaccaagcgaatgccgcgccccccggcgtaagacgagagatcgtgattattgagcgtcgccagcagcgcttcggtcgccgggccccagatgtaatcgacaatcacctgataaccacccggccccgccgccgccgcgaaggcctgcgccagcgcctcgccctgcaggctcagatccaccgtggcgtccacacccaacgcctccagcacgctcaggcgccgaccggcggcaacgatgcgcccggcccccgcctgacgcgccgctgcaaccgccagtttgcccgaggtgccggtagcgccgatgatcagcaccgtttctccgggctgcagatccgctcgccagcgcagcggcagccaggcggcgaaggccggattgatcagcgccgccgccgtggcgtcgtccaccgcctccggcaccggcaccgtccatgacgcgacgctacgctctgccatcgcgccgtaagggcggcggaaagaggcgaagtacacccgttgcccgtccgccgtacggcctacgccgtcggtgccgggcacgatcggcaattgcttcgggctggaataatgagtgccggcgacggtggcgcgatccagctgcttgatgccggccgccagaacatcgatcggcacttcattcgcctgcgcctgaggctcctcaaaggtgccgaaaaccggggcttgccccagcgctgttacgattgccgcttgcatgatgactcctcaaatcgtgggaacgtacaggaaagaataggccgcgataaaataaaaagggacaccgcatcatgcggtgtcccccaaacacaaactttgccgaacgtgttattcgtaatcgctcatcggcacgcaagagcagaacaggttacggtcgccatacacgtcgtccagacgcttaacgctcggccagtacttgttctcgcgtacgccggccaccgggaacaccgccagctcgcggctgtacgggtgctgccagtcgttgaccagctccgcctgcacgtgcggcgcattcaccagcgggttgtcttccagcggccattcgcctttggcgacgcggtcgatctcgctgcggatcgccagcatcgcatcgataaagcgatccagctccactttgctttccgactcggtcggctcgaccatcagcgtgcccgctaccgggaacgacatggtcggcgcgtggaagccgaagtcgatcaggcgcttggcgatgtccatttcgctgatgccggtctcttccttcagcggacgaatgtcgaggatacattcgtgcgccacgcggtgatcgcggccggtatacagaatcggatacgcgtctttcagacgggtggcgatgtagttggcgttcaggatcgccatctggctggcctgcttcaggccttccgcgcccatcatgcggatgtacatccaactgataggcaggatggaggcgctgccgaacggcgccgcggagaccgcgccctgctgggtggttacgccgtcgatctgcaccacgctgtggcccggtacgaacggcgccaggtgcgctttcacgccgatagggcccatgcccgggccgccgccgccgtgcgggatgcagaaggttttatgcaggttgaggtgcgaaacatccgcgccgatgtagcccggcgtggtgatgcccacctgggcgttcatgttggcgccgtccagatacacctgaccgccgaactgatgcacgatctggcacacttcacggatggtttcttcatacacgccgtgggtcgacgggtaggtcaccatgatgcaagagagttcttcgcctgcctgctccgccttgacgcgcagatcgtgcagatcgatgttgccgttcttgtcgcaggcgaccaccaccacgctcatgcccgccatctgggcggaggccgggttggtgccgtgcgccgagctcgggatcaggcagacgtgacggcccgcttcgttgcggctttcatggtagcggcggatcgccagcaggccggcgtattcgccctgcgcgccggagttcggctgcatgcacaccgcgtcatagccggtcagctgcaccagccactgagacagttggccgatcatctgctggtaaccggcagcctgctccggcgggcagaacgggtgcagttcggagaattcaggccaggtgatcgggatcatttccgccgcggcgttcaatttcatggtgcaagagcccagcgggatcatcgcctggttcagcgccagatccttacgctccaagcgatgcatgtaacgcatcatctcggtttcgctgtgatagcggttgaataccgggtgggtcaggatcggatcctggcgcagcatggcggccgggatcgattggctgtttttgctcaccgccgcgtccagcgcgtcgatgtccagaccgtgattgtcgccggccagcagtgcgaacagcgtttgcacgtcttcacgcgaggtggcttcatccagcgtgatgccgacggcgccgtgaatgtcggtacgcaggttgatgccgaagctcagcgcgcgctccagcacggcggccttgtccttcacttcgacggtcagggtgtcgaaccaggtgtggtgacgcagcgtcaggccggccttctgcagcccggcggccagaatgtcggtcaggcgatggatgcgcccggcgatgcgctgcaggccttgcgggccgtgatacaccgcatacaggctggcgatgttggccagcagcacctgcgaggtacagatattcgagttggccttctcgcggcggatatgctgctcgcgagtctgcatcgccatgcgcagcgcggtgttgccggcggcatcgcgggaaacgccgatgatgcggcccggcatcgagcgcttgaactcgtcgcggcaggcgaagaaggcggcgtgcgggccaccgtagcccatcggcacgccgaagcgttgcgcggagccgaacaccacgtcggcaccctgcttgcccggcgcggtcagcagcaccagggccatgatgtcggcagccacgctggtgatgattttgcgcgatttcagttcggccagcagcgcgctgtagtcgtgcagttcaccggtggtgcccacctgctgcagcagcacgccgaacacgccgtccagctccagcactttttccgctttatcgacgatgacgtcgaagccgaaggtttcggcgcgggtgcgcaccacgtccagcgtctgcggatgcacgtcgtcagccacgaagaagcggttggcgtctttcagcttgctggcgcgtttggccaacgccatcgcctcggcggcggcggtggcttcatccagcagcgaagcggaggccagatccagaccggtcagatcgagggtcacggtctggaagttcagcagcgcttccagacggccctgcgacacctccggctgataaggggtgtaagcagtgtaccagcccgggttttccagcatgttgcgcaggatcaccggcggcgtcagcacggcgctgtagcccatgccgatataggatttgtagcgctgattctgcgaggcgatcgccttcagctcagccagcgcctggtgttcggtcgccgcgtcgccaaccggcggcggccccggcagctgaatgtccgccggcacgatctgttggatcagcgcgctgagcgagcgagcgcccaccgctgccagcaactcctggcgttgttccgcagaagagccgatgtggcgttcgatgaacgcttcgctgtgttcgagttggctgagtgtctgagtcattgctacaaattcctgaatgcttgcgtgatacgggatatagcttgaacggtaactaaaacgccccggccgaaaggcctggggcgtgggcacgattactcgtcgatcgaggcctgataagccgcggcgtccagcaggttcgccagctcgccttcgtcggaggctttaatctggaacaggaagccgtcaccgtaaggttcgctgttcaccagctccggggagctttccagctcggcgttcaccgccacgatttcaccgctgattggcgcgtagatgtccgacgccgccttgacggattccgccacggcgcagtcttcaccggcggcgactgtgcggcccacttccggcagatcgacaaacaccatatcgcccagcagttcctgcgcgtgttcggtgatgcctacggtgtaaacgccgttaccttctgcgcgaacccactcgtgagaggatgcgtatttcaattctgttggcacattgctcatcgccggttactccttcgaagaaataaaagaatcaatcaataaaaaatcaatttgtcagcggcttgccggcgcgaacgaaaccaggcttggtcactttgaccggcatctcgcggttgcggatctgcacgatggcctgctcaccgatacccgccggcacgcgcgccagcgcgatgctgaagcccagcgtcggggagaacgaaccgctggtgatcacgccttcgtgggtttgccccgccgcgtcggtgaaacgcaccggcagctcattacgtaatacgcctttttccgtcatgatcaagccgaccagttgctcggtgccctgctcgcgctgttgttccagcgcttcgcggccgatgaaacggcgatcttccggctgccaggcgatggtccagcccatattggcggccagcggcgaaacgccttcatccatctcttgcccgtagaggttcatgcccgcttccaggcgcagggtgtcgcgcgcgcccagaccggccggcttgacgcccgcggccagcaatttttgccagaaatcagccgcctgctctttcggcagcgcgatctcatagccggcctcgccggtgtaaccggtggtggcgatgaacagctcgccggcctgcacgccgaagaatggcttcatgccttcgaccgcgcttttttgttccggggtgaacagggtgccggcgcgctctttggcctgcgggccctgcaccgcgatcagcgccagatcgtcgcgcaccgtcagcgcgacgccatacggcgcggcgtgttcttcgatccaggccaggtctttgtcgcgggtggcggagttcaccaccaggcggaaatagtcttcagtgaggaaataaacgatcaggtcgtcgatcacgccgccggaagcattcagcatgccggtgtacagcgctttgccgggttgggtcagtttggcgacgtcgttcgccagcaggtagcgcaggaactcgcgggtgcgagcgccgtgcagatccacgatggtcatgtgagacacgtcgaacatgccggcatcctgacgtaccgcgtggtgctcatcgagctgcgagccgtagtgcagcggcatcatccagccgtgaaagtctaccatgcgcgcaccgcacgccacgtgctggtcgtacagtggggtttgctttgccatcttttccctctttccactcgtcgctagaagttagggtgctgccacgcaatgcggcggagcctggctcgcggcccgatcgccatggcgcactgactgctcaacacaaatgctgcgccgggacgggcgaaaactgcgtgcaaccgccgtgacgcaaacgatacctttcccccgaacttatcaccgaacgaccacattaaccataagttaaaataggctcatcgccgttccggggcggtaaaatgccgggctagtgtgcagagtttttcactggaaaaatgcgccttaaggcacaaaattaacaattaaagcggcaaaatgccgaacttatataacaaacctatggccgcacatgggatccggacttttgataaccgaacatggaattagaaaaagtaatgataaaaagcggctgaaattagattatttcaaatgaagggttatataaggaaacgcgatggcataaagcgagaagcgcgagcccgctgcgggctcgcagaaggcaggtgtcaggcaagccactcgggcagatcgttcaggcccatcgcctgacgcaccagcttaggcttgacgccaggcaggctgcccgccagccgcagccccacgtcgcgcagcagctttttggccgggtggttgccgtcgaacagttcgcggaacccctgcatgctggccaacatcaccgccgcgccgtgtttgcggcggcgctcatagcggcgcagatagaggtgctggccaatatccttgccctgccgctgcaggcggcgcagttcggaaatcagctcggcggcgtccataaagcccaggttcacgccctgtccggccagcggatgcacggtatgcgccgcatcgcccaccagcgccaggcggtgcgccgcgaagctgcgcgcatagcggccggtcagcgggaacgccagccgttcgctttccaggctgcaggcgcccagacgcatatcgaaggccatcgccagttcgcggttgaattgttccggctccagctgcttgagacgctcagcgtcttccggcgcgaccgaccagacgatggagctcaaatgcggatcgctgaacggcaggaacgccagaatgccgtcgccgtggaaaatttgccgcgccgtagcctgatgcggctcttcggtgcggatggtggccaccaacgcgtggtggcgatagtcccagaaggtcagcgggatatcggcatgctggcgcagccatgactgggcgccgtcggcgccaatcaccaaccgggcggtcagcatacggccgtcctccagcgtgatgaaggcgtcattctcgccccacgccacctgcttgagcgcggccggggtaatcagcgtgatgtccgacaggctttcggcgcgcttccacagcgcctgctggatcaccgaattttcgatgatgtggccgagatggctgaaaccgcactcgtcgccgcggaaggcgattttgccgaagctgtcgcgatcccacacttccatcgcgttgtaggcgctggcgcgctgctggaggatgtcgtcccacacgccgatatgctgcagcaaacgctcgctggcggcattgatggcggaaacgcgcagcgcaggctgctccgacggcggcgccatatccggctggcgctgctccagcaccgccacgcgcagcccgctgccctgcaggccgcaggccaacgccagccccaccataccgccaccggcgataatcacgtcaaatgattgcatgctgctcgatttccttaaataacgcgcgacgccttgccacgccgcgtttttgggcgcgccacagggcgcccgattctgtgtctaacgttccacccagcccaatgtgcgcttggcgaaggcgtcgcgcaccgccggcaaacgctccatcgccatcagccccagattgcggccgaccaccagcggggcataacggttggcgaacaggcgaatcaatccgtcggtcacgccgatcgtcgcctgctgatcgttttgtcgccgctgctgatagcggctcagcagcgcataaccgccggcgtcttcgccgctgttcatcgcttccgccagcgtttccgccagcgacatcacatcgcgcagaccaaggttgaacccctgcccggcgatcggatgcagcgtctgcgccgcgttgcccaccagcgccagccggtggctgacatgacgatcggcggttagcaggccaagtggataactgtgccgcttaccggccttgaggatgcgccccagccgccagccgaaggcctgttgcagctcggcgataaaacgcgcgtcgtcccaggcatccacccgggcgcgatcttcgcgcgcatggcaccacaccagcgaactgcgcccctgtgacatcggcaacagcgccagcggcccataacgggtaaagcgctcgaaagctcgcccctgcggatcttccgccgtggtgacgttggcgatggtggcgaactgcggatagtcctcctgccgccactgcacgttgcaggcctgcgccagcgccgaacgcgagccgtcggccgccaccagcagctgcccgcgcagacgctggccgttgtccagcagcacttccgcccgctccgcggtgcgaatcacgtccaccacccgcgccgggcagtgcagcgtgacgcccggcgccttcgccagcagcgcgaacagccgctgcccggcgtcgtgcagttcgatcacctgaccgagcgcatcgacctgataatcctgcgcctgcagattaacgaaaccggcgtgaccgcgatcgctgacgtgcacctgagtgatcggcgtggcgcagtcgcgcagcgccggccaaacgccgatgcgcgccagctgttggcaggtgccctgcgccaaagcgatggcgcgagcgtcaaagcccgggtggctgcggtcgtccggccgggtcgcctcgaccaaatccaccgccatttttccctgagtaagcgacgaaatggccagcgccaacgtcgcgcccgccatcccgccgccaacgataataacgctcatgctacgaccttgccgccgccatcaaggcctcgatggcatcggcgtctttcaccacggtggcggtcaggttttcattgccgtcggcggtgatcacgatgtcgtcctcgatgcggatgccgatgccgcggtattcctccggcacgtccgcatccggcgcgatatacagccccggctccacggtcagcaccatgcccggctccagcagccgatcgcggctcggcgtgccgtagtggccaacgtcgtgcacgtcgagacccaaccagtggctcaacccgtgcataaagaactgacggtgagcctgctcggcgatcaattgatcgacttcacctttcaatacgcccagctccaccagcccgaccaccatgatgcgcaccacttcgtcgttgacttcgcggatgctggtgccgggcttaaacagctccagcgcacgctgcagcgacgccagcacgatatcgtacaccgcgcgctgcggccggctgaacttgccgttgaccgggaaggtgcgggtgatgtcgccggcatacccctggaactcgcagcccgcgtcgatcagcaccagatcgccgtcgcgcatctggctctcgttctcggtgtagtgcaggatgcagccgttttcgccgctgccgacaatggtgttgtaagacgggtagcgagcgccgaggcgggtgaactcatgatgaatttccgcttccagctgatattcgaacatgcccgggcggcatttttccatcgcgcgggtatgcgccaacgcgctgatctcaccggcgcggcgcatcaccgccagctcttccggcgatttgaacaggcgcatgtcgtgcagccacggccgccagtcggtcacggtggcaggcgcctgcagattctggcggaaccccttgcgcagcttgtccaacgcgccgaacaggatctgatcggcataggcgtattcgccctgcgcgtggtagaccgcatccaggccgttgagcagcaggtgcagttggtcattgatttcatcgaacggcagcgcgcgatccacgcccagctttgccggtgcggcgtcttgccccaggcggcggccaaaccagatttccgccgtcaaatcgcgcacccggttgaacaacacgctgtggttgtgcgtttcatcgcttttaatcagcaccagcaccgcttccggctcattgaagccggtcaggtaccaaaaatcgctgttctgccggtagggatagtctgaatctgcactgcgcgtcgtttccggcgcagagaaaataaccgccgcgctggccggcgccattttcgccaacagcgcctggcggcggttgttgaattcctgctgagtcattaccttctcctgaaatcatgccatccgcaccgccggcggaggggcgatagaacgtttagtgcagcgtcggtttgatattttccggcgccgtcggtttgtgacgggtgaattcgccgtggcacatgatggcggcgacccgcacatactccgccacttcttccaacgactgttccaattcttcctgatcttcgtcttcgtcgtagcccagttgcgcgatgttgcgcagatcgtcgatcgcttcaccgacttcgtctttcacctgagccagcttcggctgcatcatgcccagaccgagcaggaagtggttgacccaaccggccagcgcgtcggcgcgatcgaacacgctgacgatctccccttcaggcagcatcagttggaacaggaattcgtcatcttccagcgtgtcacgcgtcgcttcatacagctgctgcaacggttggctgagcgcctgtgggaaggcgacgccttcgttggtcagatcgtgcaccagcgcctgccagccggcgtcacggctgccgccacacagcaggccgctgatcaggccgtgcatttctgccgcggtcaacgccaccgactgctggttgagggccacggttaaagattggtaacttggaaatgtattctgtatagacatgcgcattcgtcatcgttggcaggataagttcgtgttatgctaccaccaaggtccgtcgctataccagataagcgcgacacctcagtggctagttataatcgcgatgtggcaggtttcacactgcgccggcgggtgacgaaagtgcggtaaatacgcattttgaaacccttttttgactggcaatgtgcgccacagtagattacaaccaggtactgaaaaaggggttgtatcttggtaccgaggtatatatagtggcgcccgctttgacggcccggccagggcggacaaggctggcgcgaaatttaggcaggaaggtggcatgtctgcacaaccggtagatattcaaatttttggccgctcgttaagagtcaattgcccgccagaacaacaagatgcgttgaatatggcggcggacgatcttaaccaacggttgcaagatcttaaagttcgcactagagtctccaatactgagcaactggttttcatcgcggcattgaacgtctgtcacgaacttgctcaagaacggttgaaaacccgtgactatgcgtccaatatggaacaacgcatacggatgctgcagcagaccattgaacaagcgctgcttgaacaaggtcgcatctctgaacgtcaggatgcacaattcgaataacttaagttgttgaaatcacagttttcagcaacgagtacaaaatttctctgagatgttcgccagcgggccagtcccctgagccgatatttagtacaaacagaatgtgttgctccgcgatcggtgagcacgctcggtgcgccgagaagccttaagattgcgacggcacgttcaccttgaaccatgggttcaagggttacagcctgcgacggcatctcggagattccccttctcagcggtttatgtgtgctgaacaccacacagagcaagcctgatacgatgccttttcaaccccaattcgcgcagcagcgccaaaccattcgtcaacacattcgccaacgtcggcgcgagcttacgccgggccagcaacgctttgccgcagaaaagatagccgaacgcctcgtcacgcatgaacgcattcagacggcgcacagcatcgcggtgtttttgtcgtttgacggcgaactcgataccgggccgctgatcgaacggctgtggacgctcggcaaacgggtttacctgccggtgctgcatccgttcagcccgggccacctgctgttcctgcgctatgcgccggaaacgccgctggtgcgcaatcgcttcaatattctcgaaccgcgcctcgatgtgcgcaaggtgttgccgctgggtgaactggaggtggtgctgacaccgctggtggcgttcgatcataccgggcagcgtctgggcatgggcggcggcttttacgatcgcaccctgcaaaactggcgcagcggcggcccctatcccatcggcctggcccatgattgccagcaggtggagcatctgccgaccgaacactgggatatcccgctgccggaaatcctcaccccgctctgcagctgggcgtggcacgagccaaaatagcaaaaggccggatcgctccggcctttttcgttgcggcatgccgccgaatcagaacagcaggcgggcgcggatggtgccgtcgatggccttcatgcgctgcagcgcggcgtcggcgcgcgcggtttccgcttcgatgtcgatcaccacatagccgatttccggcccggtttgcagatactgtgcggcgatgttaaccccctcttcggcaaagatctggttaatctgcgtcagcacgcccggacggttttcgtggatgtgcagcaggcggctggcgttcgggccatgcgccggcagcgacacttccgggaagttgacggcggacagagtcgatccgttgtcggagtatttcgccagcttgccggccacttcgtcgccgatgttctcctgcgcttcctgagtggaaccgccgatgtgcggcgtcagcagcacgttgtcgaactcacacagcggcgagttgaacggatcgctgttggtcgccggctcttccgggaagacgtcgatcgccgcgcccgccaggtgattgctggccagcgcgtcgcacagcgcgggaatatccaccacggtgccgcgcgaggcgttgatcagaatggcgcccggtttcatcagcgccagttcttccgcccccatcatatttttggtcgatggcgtttccggcacgtgcagcgtcaccacgtcgctcatattgagcagatcggacagatggcgcacctgctgcgcattgcccagcggcagcttgttctcgatgtcgtagaagaacaccttcatgcccagcccttcggccagaatgcccagttgggtgccgatatggccgtagccgatgatgcccagctttttgccgcgcgcctcataggagcccacggccagtttgtgccacacgccgcggtgcgccttggcgttggcggccggaatgccgcgcagcatcaacagcagctcgcccagcaccatttcggccacggatcgggtattggagaagggggcgttgaagaccggaataccgcgtttggtcgccgctttcagatcaacctggttggtgccgatgcagaagcagcccaccgccaccagtttttctgcggcggcgaacacctcttcagtcagatgcgtacgcgatcggatgccgacgaagtgtgcatcgcggatggatgccttcaaagattcggtgtctaacgcacccttgtggtattcgatgttggtataaccggcggcacgcaaattatcgaccgtgctctgatgaaccccttccaccaacaggaatttaatcctgtctttctccaatgatacttttgccatttacccgaccctatgttcagacttcagaagcggctgtgacgacacagctcccatccaacataacaaaaataacgcgggcggcaatacaaacgattgcctgcccggcaggacaaggcgcagcgttgatggcggtttacggcagaaaatgccatagggaaagttttcggcagaagctttggggagtcagttttcacaatgtgacataagtcaccaaatttgccgtttttcagaaaagatattttaaccgaagaattatgcggcccggcaccgccgggccacagacggcagaagcttatttgaccactttcacgccttccggggtgccgaccagcgccacgtccgcgccacggttggcgaacagccccacggtcaccacgccggcgatgccgttgatcttgttctccagcgccacggcgtcggtaatgctcaggttatgcacatcgaggatcacgttgccgttgtcggtcaccacgttctggcgatactccggcaggccgccgagtttcaccagctcacgcgccacgtaagagcgagccatcgggatcacttccaccggcagcgggaacttgcccagcacgtccacctgcttgctggcgtcgacaatgcagataaacttcttggcaatggcggcaatgatcttctcgcgcgtcagcgccgcgccgccgcccttgatcatctgcatatggccgttgatttcgtccgcgccgtccacgtaaatatcgagcgagtccacttcgttgctgtcgaacacgtggatgccgaggcttttcagcttggcggtggaggcatcggagctggacaccgcgccttcgatctggtgcttgatggaacccagcgcgtcaataaagtgggcggcggtagagccggtgccgaccccgacgatggtgcccggcgtcacgtattccagcgccgcccagcccaccgcttttttcagttcatcctgcgtcataatatgtcccttgcctctgtacgaaaacgtgtgcgtattatagggtaaaacgctgtttttcacgccggcaggatcacacttatttaccgcagcccgcatttttacccgcctggcggcgagctgggagcgtaatttttccacctgcgccatgcgtaaaatgtggcatagtgccggtatcattctaatttaagggatatctttccgatgaaacgcccagactatcgtacgctgcaagcgctggacgcggtgatccgtgagcgcggcttcgagcgcgccgcgcaaaaactctgtatcacgcaatcggcggtatcccaacgcatcaaacagttggaaaacctgttcggccaaccgctgctggttcgtaccgtgccgccgcgcccgaccgaacaggggcaaaagctgctggcgctgctgcatcaggtggagctgctggaagaagagtggctgggcaacgacaccggcgtcgatacgccgctgctgctgtcgttggcggtcaacgccgacagtctggcgacctggctgctgccggcgctgaagccggtgctggcggactccccgattcgcctgaatctgcaggtggaagatgaaacccgcacccaggagcggctgcgccgcggtgaagtggtgggcgcggtgagtattcagccgcagccgctgccgagctgcctggtggatcggctgggggcgctggactacctgtttgtggcctccagcggcttcgccgagcgctatttcccgaacggcgtcacccgttccgcactgctgaaagcgccggcggtggccttcgaccatctcgacgacatgcaccaggcattcctgcagcagaacttcgatctgtcgccgggcagcgtgccctgccacatcgtgaactcatcggaagccttcgtgcagctggcgcgtcagggcaccacctgctgtatgatcccgcatctgcagatcgaaaaggagctggcatccggtgaactgatcgatctgacgccggggctgtaccagcgccgcatgctgtactggcaccgcttcgcgccggagagccgcatgatgcgtaaagtgaccgacgcgttgctggagcacgggcatcaggtattgcgccaggattaaaacgaaaaaaggttcgccgcggcgaaccttttcttcaataccacacccttactgcgcggcgttacgctgcagctcgaacaccacatccacctgatcgtcgaagtgaatgctttgctgttcataggtttgcgccgcgtcgttttccgccgccgcgccggccgccttatacatccgcgccaccggcatcggctggtagttggcgacccggtagcgaatgctgtacaccggccccagcttggcgtggaagcctttggccagggattcggcctgctgagtcgcgttctcgatcgctttttgccgcgcctgctcgcgatacacgtccggcttggcgacgcccaactccaccgcgcggatctcgttcaggccggatttcaacgcgccgtccagcagctcgttcagtttgtccaactggcgcagggtgacctgcacctggcgcaccgcccggtagcccttcagcaccgactcgccggttttcaggtagtcgtattccggctgggtgcgcaggttggcggcgctgatgtctttcttctcgatgttgtttttctgcaggaaatcaaagtactgcgccacgcgctcgtctacctgcttcttcgcctgggcggcgtctttggaggaaacgcttacctcgatcgccagggtggcgatatccggcgtggcgtccacgctggcggtgccggaggtgacgacgtgcggcccttcaggcaattcagccgcctgcagcgccatcggtaacgtccctaatccgaccattgcggccatagccaatgcttttagcttcacagtgtctccttaatgacaggctgtctctgatcgccggcttttccctgcgagaaccgccggattcctggcatcaaacgtagcatatcgcacggcgttttgaattcggattagtgacaaattcttataaatttgccccctgccaggccagctgcagcgcgatgccccacatcaccaacccgaccagcgcattgatgatgcgctgcgcccgctgcgtattcagccacggcgccagccaggaggccagcagcgccaggccgaagaaccacaccgccgacgcgctgaccgcgccaagcgcgaaccaggaacgcacgtccgccgtcagctgtccgcccaggctgccgagcaccacgaaagtgtccagatagacgtgcggattcagccaggtgaccgccagcatggtgaccacgatgcgccagcggctctgcgccagctcctgcgccgcggcctgcgccggttgcgggctgaaggcggaacggaacgcgccccagccgtaccaaagcagaaacgccacaccgccccaggtgactagcgccaacagcagcggcgagcgggtcagcaacgcgctgccgccgaaaataccggcgcagatcagcacgatatcgctcagtgcgcacaatgaggcgatcatcaaatggtactgacggcgtatgccctgattcatcacgaatacgttctgcgggcccagcggcaggatcatggcggcgctcagggcaaaaccctgcaggaagacggctaacatgggaaattcctcgaatgataaaaggcgccggacgtgggcgcgtatcggtcaacacgcgcatcatacgaggaagcgatcattaggtgaaattgatgtttctaatccagtatcagaagcactaatactccaagcggcgggattgcgccgtcaaattcgctcatcgacgcgaaattcgctatcatccgcacccaccctccagccggccgcccgatgtctacgatcaccgatacctttatcgccccgccatgccatgaccagatagagatcctctatcaggacgatcatctggcgctgatcaataagccggccgggctgctcagcctctcgggcaagaatccgcagaatctcgattcggtacaccaccggctggtacagctgttccccggctgcgccctggcgcaccgcctggatttcggcacgtccggtttgatggtggtggcccgcaacaaggccgtcaacgccgcgctctgccggcagttcagcgaacgcaccgtcggcaaagtgtacagcgcgctgctctgcggccatctggcggataacgaaggggtaatagacgcggcgatcgccaaagatccggcgctgttcccgctgatgtcgatttgcgccctccacggcaagcccgcccgctcccgctatcgggtcgtcgaacgtttttatcgtgaaacggaaggcgggatctcgctgccgctgacgcgggtgcagctcaccccggagaccggacgcacccaccagctacgtattcacagccggcaattgggccatcctattttaggttgcgatctgtatggcgggcgcctgctgccgggtaccgagcagacgccgcggctgatgctgcacgccagcgagctggactttgtgcaccccatcagcggagagcggatagccgctcgtcacgccgcgccgttctgaacgcggcttaccacatcaaatcgtcgggcactttaaagtcggcgtacggatcgtcttcatcctgctcttcctgactcagcgcactgtgcagcactatgctggccgcatcgcgctgcgcgattttatcggcgacgctcgcggggataatcgcgtattcacactcttcgcggctctcgacaaccaagcgggcaatggcgaggcggccattgatcagctgcgtctgggtcgctttatccaccaggattttcttgatcaggttaccgtcggtgaagttgaaaccgatatcgcctttcgccaggacgatgcggttcatctcgatcagctgcttcacctgcgccttgtattctttggacagcgcggcctgcttttgctgctcgctcaattgcttatcgcgctcaagctgcgcctttttattctcttccaccgcctctctggcctcgcgcgcctgaacgcgtgattttttagccgttctctggactttggccattttcttgctggttaccaagcccgctttgagcatctgctcttgtaaggtgagttttgtcatgttcgtgtctgaagccgtggggtcatggtgggattatacccgtaatttttcaggctgcaccagcttgccgggcggcttgcaacgcagggcaacggcggcaaccccacctgaaccccagatcatgaatgtggctcatgtggtaatgaaattaagtctctttcactcccaccgggactctggcaaaaatagacctcattaacgacagacaatatgaaatcggctgaatgaaaaaatagaaaaacaagccattgaaataaatggataaacccagccctcatatcatataacaggatgctataagacgatgaatagagactttacctttacgattaagagcagttctttcgatgaagattataacccttctgaaaatacgcgtatcaccaccaacttcgccaatttggccagaggagaaaaccgccgggagaacctgcgcaacacgctggtgatgattaacaaccgcttcaattcgttggcgcattgggataaccccaaggccgatcgctatgcggtcgagcttgaaatcatttcggttgagatgcgcattgaagatcacagcgccagcttcccggtgatagaaatcctgaaaaccaacatccttgataaaaaaacgcaaacgcgtatcgagggcatcgtcgggaacaatttctcctcttacgtgcgcgattacgactttagcgtcttgctgccggcgcacaataaaaacacggcggaatttaccattccggatgatttcggcgatttgcatggcaatatctttaagcacttcgtcaattcaaacgaataccatgagaatttcagcaaaccgccggtgatctgcctcagcgtgtccagcaaagacacctatcatcggacgggcaatcaacacacggtcttgggcgacgagtatcggcaagacggcgcttcgctgaccgaccggtattttaaaaaaatgggcctgcaggtgcgctatttcatgccgaaaaatagcgtcgcccccctggcgttttatttccccggggatttgctgagcgattacaccgatctggagctgattggcaccatcagcacgatggagaccttccaaaaaatctatcggcctgaaatttacaatgccaactcggcggcggggcaatgctatcagccaagcctgaataaccaggatcattcattaaccaagattgtttacgatcgcgaagagcgtagccagttggcgatcgagcaggggaaatttacggaagagcaatttatcaaaccctacaagcctattcttgagcaatggtctgcccactacgcgctttgattcacttaaatacaggtcacctatcatgaaaatattgctccccacatcgaccgccggcagcttacccaaaccggtctggctggcccaaccggaaaccctgtggtcgccctggaaattgcaaaatgaagaattaatcgaaggcaagcaagacgccctgcgtttatcgctggcagagcaacaacaggccggcatcgatatcgtcagcgatggcgagcaaacccgtcagcacttcgtcactacgtttatcgaacacctcagcggcgtcgatttcgagaaacgcgaagtggttaaaatccgcaatcgctacgaggcgagcgtgccaaccgtggtgggggcggtctcgcgtcaaaagcccgttttcgttgaagacgccaaatttttacgccagctgacccagcagccgattaaatgggccctgccggggccgatgaccatgatcgacacgctctatgacaaccactataaaagccgcgagaaattggcctgggagttcgccaagatcctcaatcaggaagccaaagagcttgaggccgcaggcgtcgacattattcagtttgatgagcccgcatttaacgtgttctttgacgaggtgaatgactggggcatcgccgccctggaaagagccgttgaagggcttaagtgtgaaaccgccgtacatatctgctatggatacggcattaaggccaataccgactggaaaaagacgctgggctctgagtggcggcaatatgaagaggcgtttcccaagctgcaaacgtcgactatcgatattatctcgttggagtgccataactcgcacgtgccgatggatctgcttgaactgatccgcggcaaaaaggtgatggtcggcgccatcgacgtggcgaatcatgccgttgagacgccggaagaagtggccgacacgctgcgcaaagcgctgcagtttgtcgatgccgacaagctctatccgtcgaccaactgcggcatggctcccctgcctcgtcaggtcgcccgcggcaagctgaatgcgttaagcgcaggcgccgagatcgtgcgccgagagctgttggccaaataaccgcgccagcgcccgccgcagtagcctcctgcggcgggcgattatcaatcgactccttctccccgcaacgcccccgcgctggtgtatactcggatttctacgcgatgccagccacagcggcctgaacggcccctcagccagcccacaccagcttaataacagtggaaccctcatgagcccagataccgctcgcatcagcgaaatcatcgatcgcgccaggatctcaccctaccaaatcctgatcctgaccttatgtttcctcatcgccctgctggacggcttcgataccgccatcatcggctatatcgccccggcgctgcgcgaagagtggggcctgcagccagcgcagctctcccccgccttcggtgcgggattgttcggtctgctgatcggcagcctgctgttcgggccgatcgccgacgctatcggccgcaagcgcgtgctgctcgtcgcggtgctggtgtttggcggctgcaccctggcttcagcctatgcgcattcgatcgaatccctgacctggttgcgctttatcaccggcattggcctcggcggcgcgataccgacctgcatcaccctcagctctgagtactcaccggcgcgccggcgcatgttgatggtcaccctaagctggagcggctttaccgccgggctggccctgggcggcctgctggccgggcagatcattccagcgttcggctggcgcggcctgctgctggtcggcggcattgcaccgttggcgctgctgccgctgttggcctggcagatgcccgagtcggtgcgctttatggccgccagcgccaaacatgccgatcggctgcgccgggtggtcgagcgtatcaccggccagcgttggacggggggatccattttcgatgacgagcgcccggcgcaggccaggtcgccgatctcgcacctgtttatcgaagggcgcgccgtgcgcaccctgctgctgtgggcggcattcttctgttcgctgttcgtgttctacctgctcaccagttggctgccgacgatcctcaaagacgccggtttcgatatcgcccacgcctcgcgcatcggcgcgatggtgccgctcggcggcaccctgggcgccatcctgatggcgctgctgatggatcgggtcgggccctatcgcgtgctggccttctcctacctgggcgccgcgctggtgatcggcgctaccggttacctgatgggcgacgcatacacgctggccgccgtcgtgttcctgataggcttcggcgtggccggcgcgcaaaacggcctgaatctggtttccgccaccctttacccgaccgcagcccgcgtgaccggcgtcagctgggccatggccaatggccgcttcggctcgatcgtcggctcgatgctcggtgcctggatgatgaccgccgccggttcgccggaagtgttcttcctctggctggcgctgccggcgctgctgggcgcagccgccatcttcctgctttatcgcctcagcctgcgccgccgcgcgccgctcaccgaaccggcggccggcatctgaactcgcggaaaataaaaggccgagacgccatcagtgacgtctcggcctgcaataaaaaagggggctaaggccccctctctgttattccgccttggcggaagcgtcttcggtgcgatacaggtgcacgtccatctgcgggaacggaatgccgatgttgtgggcatccagcgcgcgcttgaagttttccatcagatcgaagtacacgttccagtattccgcgttggtggtccaggaacgagtcacgaagttcagagaggacggcgccatctcgttcagacgcacggtcacgcctttagcgtgcataatgcgcttgtcggcggcgatcacgtcgcccaacaccttcttcaccacgtcgatatcggcgttgtaggccacgcctaccacgatgtccacgcggcggttcggttcgcgggaatagttgatgatgttgccggcgatgattttaccgttcggcaccacgatggttttgttgtctgcggtacgcagggtggtggagaaaatctgcacctgatcgacggtaccggccacgccgcccagatcgacatactcacccacgcgcagcgggcggaagatcaccagcagcacgccggcggcgaagttggacagcgagccttgcagcgccaggccgacggccaaaccggcggcacccagcacggcgatcaccgaggtggtctgcacgccgacgcgccccagcaccgcgatgaaggtgaacgccagcacgccgtaacgtacgatcgccgacaggaagtccgccaccgtggcgtcgatgccgcgcagcttcattacgcggttcagcgcattgccgaccacgcgggccacgatcgaaccgatgatcaggataacgatggcggcgacgatattcaccgcatactggatcaacagatcctggttcttcaccaaccagtcgccggcaccgttgatgccgtctactacattcaaatctttcattcgtgtcgtcctaactcagtccctaacgggagaaactcgcaaaaatacactggcttcggcagccagtaggaaaccaccgcctaagggtaaccaacattaaaggctcatgccaaccgtcagcgttaaaaatagccgaaaccgcccgccgcttcttctatgctgaaaacagcgcgttggccatttcacgacaagggatccgttcttcatgcacattcgctcttcgcttaaacactattggcaagtgcggcccaggctgctgctttccgtcggcgccgggctgttgtgcttcctgcttctgcccgcccagctctcgctgctgcaacgcttgatgatcggctggaatacgctggcctggctctatctgctgtttctctggcggctgatgctggtcagcacgccgcagcacattcgccagatcgcccggcgacaggatgaaagcgccagcacggtgttggcgctggtcagtttcggttgtctggtgagcattctggcgatcctgttcgaattgagcagcgccaaacaggccagcgactcgctgaaaaccctgcatctggcactaaccggcggaacgctggcggtatcctggctgctgctgccaactgccttcaccatgcactatgctcatcagttttatcgccagggcgcacagcaggatcctttgccgctgctgttccccggcaatctcaccgagccgacctatctggatttcgcctacttctccttcaccatcgcggtcgcgtcgcagaccgccgatgtggcggtcggcgccgcggaggtgcgtaaaatcgcgctcgtgcagtcggttatttcgttcgtgttcaacatgctgatcctgggcctgtcgatcaacgtcggtgccggcctgctgggctgaaaacgaaaaaggctccccgcagggagccttttaatcacaaacaaaggaggaaaaaacgtggtttttcctcctttgtgatcatcagccgaaaatcaataaattgattttccttattttttatattttgccaacggcgagccaggcaacgccatcaggcttgtcataaacaacaaggctccccgcagggagccttttgcatagtgcaacagctggcgaagattacagaacgtctaccgcgttcagatctttgaaggcctgctccagacgcgtcaccatgctggtctgcgctgcgcgcagccagacgcgtggatcgtagtatttcttgttcggctgatcggcgcctttcgggttgcccagctggccctgcaggtaagcttcgttcgctttgtagtactgcaggatgccgtcccaggtcgcccattgggtgtcggtgtcgatgttcatcttgatcacgccgtagctgacggactctttgatttccgcatcgctggaaccggaaccgccgtggaacacgaagttcaggctgttatgcggcaggttgaatttctcggaaacgtatttctgagaatcgcgcaggatggtcggagtcagcttaacgttacctggcttgtacacgccgtgcacgttaccgaacgaggctgcgatggtgaagcgcgggctgatggcgttcagtttttcgtacgcgtaagccacgtcttccggctgggtgtacagcgcggaagcgtccatatggctgttgtccacgccatcttcttcaccgccggtgcagcccagttcgatttccagcgtcatgccgattttggccatgcgcttcaggtaggcgctgcagatctcgatgttttcttccagagattcttcagacagatcgatcatgtgggaagagaacagcggtttgccggtagcggcgaagtgcttctcgccggcgtccagcaggccgtccagccatggcagcagtttcttcgcgcagtggtcggtgtgcaggatcaccggcacgccgtagtgttcggccatctggtgaacgtggtgtgcgccggagatagcgcccagaatcgctgcgccctgaggcacatcggtcttcacgcctttgccggcgataaacgctgcgccgccgttggagaactgaacgatgaccggcgcgcgcactttagccgcggcttccagcactgcgttgatggagtcggtacccacgcagtttaccgctggcagcgcaaagttgttctctttagcaactgcgaagactttctgaacgtcatcacccgtgatgacacccggttttacgaaatcaaaaattttagacatgttactttgtcctgtttcgtcggccgtagatggatgtaaatcgatgttttcacgccgcgcagcgttagccgcgcggtataaaacaaacgggcggctttcgcctcccgttgtctgaattactgcttagcgcgctcttccagcatcacgactgcaggcagcggtttcccttcaacgaattccaggaatgcgccaccgccggtggagatgtaggagattttgtcagcgataccgaacagatcgatggctgccagagtgtcgccgccgccagcgatagagaaagcgtcgctatcggcgatcgcgcgggcgacaatttcggtgcccttacggaagttagggaactcgaatacgccaaccgggccattccacagaatggtcttggcgttcttcaggataacggccagacgctcggcagagacgtcgcccatatccagaatttgctcgttgtcctggatctcgctcgccggcttcacggtcgcggttgcggtttcggagaactcggtcgctacgcgcacatcggtcggcaccggaatgtcgcaggtttccagcagtttctgcgcgttcgggatcaggtcaggttcgtacagggactggcccacgttgttgccctgcgccgccacgaaggtgttggcgatgccgccgccgacgatcagctgatcggcgattttggacagagaatccagcacggtcagtttggtggagactttagaaccgcccacgatggcgaccatcggacgggccgggttgcccagcgctttgcccagcgcttccagttcggcggacagcagcgggccggcacaggcgacaggcgcgaacttgcccacgccgtgggtggaagcctgcgcgcggtgcgcggtgccgaatgcgtccatcacgtacacgtcgcacagcgccgcgtatttcttggacagggtttcgtcgtctttcttctcgcccttattgaagcggacgttttccagcaccaccagttcgccttcggcgacgtcgacgccatccagataatccttcgccagacgcactggggatttcagatggtctttcaggtagttgaccacaggcagcagggagaattcttcgttgtactcgccttcggtaggacgacccaggtgggaggttaccatcacgcgggcgccttgcttcagcgcagcttcgatagtcggcagggaagcgcggatacgcgcgtcggaagtcactttaccgtcttttaccggcacgttcagatcggagcggatcagtacgcgtttacccgccagatccagatcggtcatcttaattacagacatggtgaaccctctttattgaatctctataaaattgcctgagcagcgcgccaatcacgccggcgccgccgtactagaaaccgctggcagccattgcccgtgttgtatccaacatccgattggcaaagccccattcattgtcgcaccagaccaaggtctttatcaggtgctgcccgctgacccgggtctgcgtaccgtcgacgatagcgctgtgcgggtcatggttaaaatcgatcgagaccaatggtaattccgtgtagtcaactataccacgaaatgattcccgtgcggccttttgcaacagctggttgacctccgccaccttcaccgcggcgctcacgctgacgctcagatcgatagccgtcacgttgatggtcggcacgcgcaccgagatagcctcgaagcggtcgcaaaactgcgggaagatgcgggtgatgcccgcggccagcttggtatcgaccggaatgatcgactggctcgccgcgcgggtgcgccgcaaatccgcgtgatacgcgtcgatcaccggctgatcgttcatcgccgagtgaatggtggtcacggtgccggattcgatgctgtaggcgtcgtccagcagcttgatcaccggaataatgcagttggtggtgcacgaggcgttggacacgatgcgatgttccgccagcagcgtctgatggttgacgccgaacacgatggtggcgtccagatcgttgccgcccgggtgggcgaacagcactttcttcgcccccgccgccagatgggcttcgccatccgcccggctgccgtacacgccgctgcagtccagcaccacgtcgacgcccagctcgccccagggcaactgctccaccgccggctggtgcaacaggcgaatcgcgtcgtctccgacgctcagcgtgtcgcactcctgccgcacatcccaggcgaagcggccgtggctggaatcgtacttcagcagatgggccatgccttcggcgttcgccagctcgttgatcgccaccacggagatttccgcccgtcgtcccgattcgtacagtgcgcgcaatacgctgcggccgatgcggccaaagccgtttatcgctatgcggatggtcatgctgctcctgaaaaagggccgtccacgccgggtgactcaccggcgccgcccggcgctgactggttgtctcactaacccgcatagagtagtggatcgtaccgcccgctgtgaatcgccgagtttgcattattcccgcgcttcagcggtttttcaccgccgtcacatcggcatttctgttgaagagtgcttcaactgaaacgcttcagctgagcataaaccaaagttttggcaaaaggaacaggtgcaacagttcctcaggtaacggaggggagttttacgagcataagatgatctggcgcacatttttggcctcaagaccgcgacggattttcgctcgccggccccgtttcgccgtagtgctcacgaaaatagtcgcgcaaaaattcgaccgtcacccgcactttcgccgacgttgccagccgggaaacgtataccgcccagatattggccggctgataatactccggcaggatgtgcaccagcctgccgctgtcgatgttctctttcacgtcccaggcggaacgcagcgcgacgccctgcccgtccaggcaccactggtgcacgatttcgccgtggttcgacgccagcgcccccgtcaccttcaccgtctcttcgccgcccggcccctgcagccgccacagcccgaacgggtgatcgcgttccttgatcaccagacaggaacggcccgccagctcagccggatttttcggcacgccgtggcgctgcaggtacgccggcgaagcgcacaggatgcgctgattgtccgccagcttgcgcgcaatcaaattgggggcgatatcgtcgccgatgcggatatccagatcgaatccttcgctgaccagatccaccagccgatcggacacgtcgagccgcagttccagctgcgggtactgccgcgccagcgccgacagcgccggcgccacgaaacgccggccgaagccgaagctgctgaccacgcgcagcatgccctgcggcgcctggcgcacttcggacagttcgtccatcatctgatcgacatcgttgagaatgcgctgcgcccattcgtagatgcgttcgccgtcttcggtgatcgccacccgccgcgtggtgcggtgcagcaacgacacgtccagcgccttctccaacagcgcgatgcgcttgctgataaaggcaggcgaaacacccagctcttcggcggcggcggcgaacccggcgcggcgcgccaccagcacgaacacccgcaggtcactcaggatcggcatattgttcatgattcgtgttttatgtttcaccgttttcgcgattgattaacagttagtcaattataggataagagtattgtcaatctcccctacctacaaatgagacctctgtatgagcaaaacttacaagattgccgctatccccggggacggtatcggacgggaagtgttgccggaaggcatacgggtattgcaggcggcggcggcgcgctgggatctgtcgttggaattcgacaccttcgagtgggccagctgcgactactaccagcaccacggccagatgatgccggacgattggtttgagcagctcaagggcttcgacgccatctatttcggcgccgtcggctggccggacacggtgcccgaccacatttcgctgtggggttcactgcttaaatttcgccgcgacttcgagcaatacgtcaacctgcgcccggtgcgactgtttcccggcgtgccctgcccgctggcgaacaagcagccgggagacatcgatttctacgtggtgcgcgaaaataccgaaggggaatactcctcgctcggcggacggatgttcgaaggcaccgaacgcgagatggtgatccaggaatcggtgttcacccgtcagggcgtggaccgcatcctcaagtacgcctttgagctggcgcagcagcgctcgcgcaagcgtctgaccgccgccaccaagtccaacggcatggccatcagcatgccgtactgggatgagcgcgtggcggagatggcgcgccaataccctgatatcgcctgggataaacagcacatcgatattctgtgcgcgcgcttcgtgctgaaccccgaacgcttcgacgtggtggtggcttccaacctgttcggcgatatcctgtcggatctcggcccggcctgtaccggcaccatcggcatcgcgccgtcggccaacctgaacccggaacgcaacttcccgtcgctgttcgagccggtacacggctcggcgccggacattttcggcaaaaacatcgccaacccgatcgccatgatctggagcggcgcgatgatgctggacttcctcggcgacggcgatgcccgctaccgccaggcgcacgacggcatcctgcaggcgattgagcgcattatcgccgacgggccgcgcacgccggacatgcgcggcgacgcctccacccagcaagtcggccaggcgatcgccgccctgctgcaacgctgaacgccgcagattttcccgcgcagggcgcccttccgcgccctgctttgctacgtccgtttttccgcatcgatcgctgccgcaaatccgttgaaaatcaccgcagaaggcacgccaataccccggtcaagatcacaacaaattgtttacatactgtgttttatccttttacagatgccctaattgtggccctcctgtaatttgtgcacactcaaaaatgttaatgaagagtaaatattcccggcagcgttcagccggggcgtttgctcctcgcggtgtaacaaaacaaagggttcaaaccaataaggcccgggcgccccctacgctttgcgcaccggcccaccaccgataacaggagttcactcccatgcagagcaatcccaaaaaggatgtcacgctcatcgccatcagcctgtgcagcattgcgctgatcgccctttgcctgatgctctttccggcccaatccgcgcttatcgccaacaccattttcaacggcgtcacccggctgttcggttcaaccattcaaatcctggtgctgatcgccctgctggtggtgctgtatctggcgttgagcaaatacggcaacatccgcctcggcgaaggcaaaccgcaatactccacgctggcctggctgttcatgttcatctgcgccggcctgggctcgtccaccctgtactggggggtgatggaatgggcgtattattaccagacgccggggctgaacatcgcgccgcgcaccccaaaggcgctggaatacagcatcagctactccttcttccactggggcctgagcgcctgggcgacctacgccctcgcctcgctgatcatggcctaccacttccacgtgcgtaagaacaaagggctcagcctgtcggggatcattgccgccatcaccggcgtgcgtgccaacggcccgatcgggcggatggtggatctgattttcctggtcgccaccgtcggcgccctcaccatttcgctggtgctgaccgcctccacctttacccgcgggctgacggcgttgaccggcatcccggataacttcacggtacaggcgacggtgatcctgctggcggcagtgatcttctgtctcagctcttacatcggcatcgacggcggcatgcagcgcctgagcaaaatggtcggctggggcgccttcgccttcgccgggctggtgctgctggtcggccccaccgagttcaccatcaacaacaccatcaacgccatcggcctgacggcgcaaaacttcctgcagatgagcctgttcaccgacccgatgggcgacggcagcttcagccgcagctggacggtgttctactggctgtggtggatctcctataccccgggcgtggcgatgttcgtcacccgcgtctcgcgcggccgcaagattaaagaagtgatctgggcgctgctgctcggcagcaccctcggctgctggttcttcttcggttcgctggaaagctacgccatgcaccagttcatcagcgggcagctcaacgtgccggagatcctcagcacccagggcggcgaaaccgccgtgcagatgctgctgacggcgctgccgctcggcaagctgttcctggccgcctatctgttcatcatgatcattttcctggcctcgcacatggacgccgtggcctacaccatggccgccaccagcacccgcaacctgcaggaggggcaagatcccagcccgatgctgcgcctgttctggtgcgtagtgatcaccctgatcccgctgtcgatcctgtttaccggcgcctcgctggacaccatgaaaaccacggtgatcctgaccgcgctgccgttcctgctggtgctgctggtgaaaacctacggctttgcccgctggctgaaacaggactacgcggccatcccggcgcacctgatcgaaagcagcccaccggcgctgccagacgcgccgccggccgccgaactctccgctccatcgtcgtatcaaccgcgccctatggcgaaatgacaataagaaaagaggaaggttaacttatgagcactctgatccctgaatttaccttaccgaaagatttctgcgccgacgcccgcgaggcttacaccattccggcccggttctatacccaccaggcagcgttcgagcacgagaaagagcaggtgttcgccaccagttggatctgcgtggcgcaccgcagcgagctcgcccaaccgaacgactacatcacccgcgagatcatcggtgaaaacattctggtggtgcgcggccgcgacaaagtactgcgcgccttttacaacgtctgcccgcaccgcggccaccagctgctggcgggcgacggccgggcgaaaaacgtcatcacctgcccttatcacgcctgggcgttcaagctggacggcgaactggcgcacgcgcgcaactgcgaaaacgtgcagaacttcgataaggaaaactcgcatctggtgccggtgcgggtcgaagagtacgccgggtttatttacgtcaatctggactcgcaggccggcacggtggaagaccagctgccgggcctcggcgccaaagtgcgcgaggcctgcccgcaggtcgacgatctcaagctggcggcgcgcttcgtcacccgcaccccggccaactggaagaacatcgtcgacaactacctcgagtgctaccactgcggcccggcgcaccccggcttcgccgactcggtgcaggtcgaccgctactggcacaccctgcacggcaactggacgctgcagttcggctacgcccgcccttccgagcagtcgttcaagtttgaagagggtaaagaagccagcttccacggcatctggctgtggccgtgcaccatgttcaacatgccgccgctggaaggcatgatgacggtgatctatgagttcccggttgatgcggaaaccaccctgcagcactacgacatttacttcaccaacgccgatttgagcgacgaacagctcaaactgatcgactggtaccgcgacgtgttccgcccggaagatttgcggctggtggagagcgtgcaaaaaggcctcaaatcgcgcggctatcgcgggcaggggcgcatcatggccgacggcgctggcagcggcgtcagcgagcacggcatcgcccacttccacaacctgctggcgcaggtttatcaaccctgatgcgacggggcccaagggccccttcccctgacttgtgaggttctcgtgaatatttccgatcgggcgctattccgccaacaggcctacatcaacggccaatggcgcgacgccgacaaccaggaaaccctgccggtgagcgatcccgccaccggccaactcatcggcagcgtgcccaacatggcgacggccgaaacccaatcggcgatcgacgccgcccagcaggcgctggaaggctggcgcgcgctgccggcgcaacagcgcgcgcagctgctgcgccgctggttcgaactgatgctggaacaccagcaggatctggccagcctgatgacgctggagcaaggcaaaccgctggcggaatcgctgggcgaaatccgctacgccgcctcctttatcgaatggttcgccgaacaggccaagcgcaccaatggcgacatcatcccctcgccgagcagcgataaacgcctgatggtgctgaagcagggcatcggcgtgtgcgcggcgatcacgccctggaacttcccggcggcgatgatcacccgcaaggccgcaccggctctggcggccggctgtacgctggtggtcaaacccgccaacgaaaccccttattcggcgctggcgatggccgagttggccgagcgcgccggcattcccgccggggtgttcaacgtagtgaccggcaactcgcaggcgatcggcgccgagctgacccgccacccgcaggtgcgcaaactcagctttaccggctccacgccggtgggcaggctgctgatgcgccagagctcggacaccatcaagaaggtgtcgctggaactgggcggcaacgcgccgttcatcgtgtttgacgatgcagacatcgatgccgcggtggaaggcgcgctgatcgccaaataccgcaacgccgggcagacctgcgtgtgcgtcaaccggttctacatacagcgcggcgtttacgcccagttcgccgaaaaatttgtcgcccgggtagcggcgctgcaggtcggcaacggtttcgaaccgggcgtgcaaataggcccgctgatcaaccgcaaggcgcgcgacaaggtgctggagctgctcgatgatgcgctgagcaaaggcgcccaggtgctgaccggcgctacgccgcacacgctgggcggcaacttcttcaccccgacggtgctgggcgacgtacagcccggctcgctgctgctggaagaagagatcttcggcccggtcgcgccgctggtgatattcgatgacgaagccgaggcgatccgccaggccaacgacaccatctacggattggccgcctacttctacacccgcgatgcggcgcgcatctggcgcgtttcggagcggctggagtacggcatggtcggcatcaataccgggcttatctccaacgaggtggcgccgttcggcggagtgaaacagtcaggcctggggcgtgaaggctccgaatacggcatcgaagactatctggagctcaaatacctgtgccaggcggtataacttttttatgcgcggggacgcccgcgctttggagccaatgaatgaccagctatcagatgcttgatgttcgcgtcgtcgacatcgaaaccgtcaccgcacaggtcaagcgctttaccctggcggatccgcaaggccggccactgcccgccttcagcggcggcagccacatcatcgtgcaaatgcaggacggcgagcagcgctacagcaacgcctattcgctgctcagttcaccgttcgagctcgaccgttaccagatcgccgtgcgccgtgagtccccttccaaaggcggttccgacttcatgcacgatcggctggcgatcggtgatacgctgaccatcagcaccccgaataacctgttcgcgctggcgccggaagcgcaacatcacgtgctgatcgccggcggcatcggcatcacgccgtttatggcccatctgcatgagctgcaacgcagcggccaacgctaccatctgcactactgcttccacagtgaagagcacaacgccttccagcagcagctgatgcaagcgccgttcgcagacaacgtcagttgccatgtctccagccttggcggccggttggatctggcgcgcacgctggccgacgtggaacccggcgcccatatctacgtctgcggcccggcggcgctgaacgaagcggtctaccggatcgccgccgaacggggtatcgatgccgcgcgtttacacagcgaagcctttgccgccgaagacacggcgggcggcgcctttacgctggtgctggctcgatcgggtattgaacttgaagtgacggaagacatgaccatcctgcaggcgctggaaaacagcaaggcagccagggtcgagtgcctgtgccgcgaaggcatttgcggcacctgcgaaacccgcatcgtcgagggggaagccgaccaccgcgatcagtatctcagcgacgaagaacgcgcggcgcagcaaaccctgttgatttgctgctcgcgcgccaaaggcagccggctggtgctggatttgtaaaaggagcgcccgcatcggcgggcgtcctggttaggctttcgggaatatccacagatgctcggccggcagggagagccggcacagcgcccgatcgcgcgcctcgtggccataggcgcgcaccacgaagtcttcggccacggtgcggaacaggtattcccaacgatcgccgagatacatgctggtcaacaacggcagctcaagctggttgccctgcggatcttcgcccaactgcacgcgctccacgcggatcaccgccgtgccctcctgcccgacctgcacgccggcgcccgctttgccccacagcgcccaatccttgccttcgatgcgcgcccggtcgccttccagcgccacgatcttgcccggcaagcggttgttgctgcccatgaactcggcggtgaacagcgtggtgggcgagccgtacatctcctgcggcgtgccctgttgttcgattttgccgttattgagcagcaggatgcgatcggaaatggccatcgcctcgttctgatcgtgagtcaccatcagcgccgacagaccgagcttgatgatcagctcgcgcaggaatacccgcgcctcttcgcgcagcttggcgtcgaggttggacagcggctcatccagcaggatcaccggcgggttgtagaccagcgcacgcccgatcgccacgcgctgctgctggccgccggaaagctggtgcgggtgccgcttggccagatgccccaacccgagctgatccagtaccgcctgcactcgctgggcgatttccgccgagccggtcttacgcagcttcagcgggtaagcgacgttctcaaacaccgttttatgcggccacagggcataggactgaaacaccagccccaggttgcgctcttcggcgggaatttcgctgcgcgcgctgccgttgtacaccgcgctgttgccgatgacgatccgcccctggctcggtttctccagcccggccaccgcccgcagcagcgtggttttgccactgcccgacgggcccagcagcgagaccacttcgccccgtttcagatccatcgacacccctttcagcaccgggttgtcgccataggtcaaatgcagattctctaccgaaagttcaatcatgtaatttcactccaaagcgcaaggcgatccccagccccagcaccaccagcagaatattgatgaacgacagcgcggcgacgatatcgatagcgcccgcggcccacagagaaaccagcatcgagccgatggtttccgtgcccggagacagcagatacaccccggtggaatattcgcgttcaaaaatcaggaacatcagcagccaggagccgatcaggccatagcgcgacagcggaatggtgacgtggcgggtgatctggccgcggctggcgccggcgctgcgcgccgcctcttccagctccggccccacctgcagcaacgtggaagagatcagccgcaggccgtaggccatccacaccacggtgtaggccagccagacgctgaatatggtgctgcgcagcgaacgcagccagacaatccagttagcacgcagccattcggccatcggcaacgccgacagccagccttccttgagcgatttgtccagccacatcggcaggaacaggaacacccacaggaatgccagaccggccagcagccccggcaccgcgcgcggcaccagcacgctgtagtcgaggaagcgagtggcgccatccggcttgcggtgcatcgcgatgccgataaacaggtagcacgccaccgccagcgccccgccgatcaccccgatcgccatcgagttgacgatggcgcgcagcaggttgggctgcgcccagatggtgcgaaaggtgttgatcgacagttcgtcccagacagacacgcccacgccccagttggagataaaggcgcgcagcaccacgccgatcagcggcacgccgatggtcactgtcagccagaacaccaccaccgcgccggccacccagcgccatttacccagcggcagcgcgcgggcctgcgaggctttgcccttgacggtgacaaagcggttggcggtgcgcatcagccggcgctgcagcatcaccaacggaatagtgatgcaaatcagcaccaccgccaccgccgccatcagatggtaagacggcgtgcccagcttgttggtcaactggtacaggtaggtcgccagcaccaggttgccttccggatcgcccagcaccagcatcaggccgaacacttccagcccgaggaagaacagcagcaccccggcgtacaagatagacggccgcaccatcggcagactgacggcggtcatcacctgcagcggcgtggcgccggcggtgcgcgccgcttcttcaacgtcggagcccacgctgcgcagcgccgaggagatgtacagatacgcgtggggcacgtgcgtcaatccggctatcaccacgatgctggccattgagtagatgttccacggcacgaagcccagcagcgcctccgcccacagcgagaagaagcctaccggccccgccgccaccacgtaaccgaaacccagcaccatcggcgacacgaagatcggcaccagaatcagcggttcgatgattcgccgccccggcagatcggtgcgcaccatcaggaaggccaaaataccgccgagcgggatggcgataatcaccaggccgaatgccagaataaaaccgcttttcagcgccttgtagaaatccgggtcggtaaagatgaactcgaaggcctcaaggctgaagaccttggaaggagagaaaaacggtgccgagaggaagctttgaatgatgataaacgacagggggacatagataaccagcgcggttatcaacaccaccaggccgcgcggcaggctctgccactttctgcgccatgcttgcataaatgctccctatggttgtaaacgacgaccaaagggcgcgcgcccgtgcgacaggcgcgcgtccgaatgcagtccctgttatttcgccgcggcggcgcgccattgtttgatgtagtcgagacgcttggccggctgcagatattccagcaggctgtcatcgaccgggatcggcttgagcgcgttacccaacagcttggtcatgccatcgatgtcgttcttgccttcgatgtcgttgcggatcgaggggatatccgcctgattggcgagaatattttgccctttctccgacagcacgtagtcgaaccacagcttggcggcgttagggttgccggcctctttgctgatgaagctcacgcgcgacagcaccagggtgtagtctttcggatagacaatgccgagcgacgggtcgctcttggcgcgagcctcggcgtacgaaccgaggatattgaagccgatcaggttttcaccggaggaaacgcgttccatcatggtgccggtggaggattgcaccgccaacccgcccttggccacatcggccagcgttttgaagtagttaggatcggccttgaagtcctgcaccgacagcatgaagccgacgccggatttttcgatgtcgtaggtggtgactttcttcttgaatttgtccgtctggccggcgataagcttggccagcgccgcatgcgaatccggcacatcgccttgcgggatcaggcgtttgttatagataaacaccaccggctcgtaggtggtgccatacaccttctcttgccataccgcccatttcggcagctgagcctgctcgggggaggcatattcctgcgcgtaatcgcccgccagtttcaaaatggtgtccatcgacgagctccacaccacgtcgccgctggtgccgccggccgcctgctcgctgataaagcggttatacagttcggtgctgttcatgtcgttgtattcgaccttgatgcccggatacaacgcctcaaacccctggatcaacggcgccgccgccttggtgtcggtggtcgagtaaatcaccaccttgccttctttcttcgcgccgtcgaccagtttctgatagtcggcggggtagcccgccgggaaggccgcataggcggaaacggagcccagcaaggtgattgccgctacggtcgcgctgatttttttcatcatcatcatccatcccctgatcacatttaataaaccaaaaattaacatatagttaataactgtgacgaggcaacggcgttgctttgttatctttcggttttgtgaggttggacgtttttcagccaataaaaagcccggcagcgcgggctttacggcgcttccagtcgcaaactattcggccaggcgagaacgccgcagcaggcgaattcgctgtacgatggcgacccccagcagggtcagggcaaaccccgccaactgcaccagcgacagcgcctcgccaaacagcgcataagcctgcagcgctgccgccggcggcaccagcagcatcagcgcggtaatgcgagtcaaatcgccgtggcgcaccatccagatgaacagcgcggtgccgcccagcgacaacacgccggccgaccacagcagcgagaaccacagcgtcggcgaattgtcccaggcgccggagcccatcacggccgccaacgcgccggtcacgatcgccgcgccgaggtgctgaatggcgcccgccgcccgcagatcggccgccgccagcgaagacttctgcaccatgatgccgatcgtcagcgcgacgatgctgccaaaccccatcaggatcggcaacagcgccatattgccgacatcaatgccggtcagccggggagaaagcaccagcgcaacgccgataaagccgatcgccagcccggcccaggagcgcaaccctatcgatttgcgcagcaccaacgcgaaaatcagcgcggtgaacagcggctgcaagccgccgatcagcgacatcaccccggccgccaggccgttcgctaccgcccaccagcttgcagcgagataaacgccattcatcaacatgccggtcagcaggtgcatcacgaactgccgccccttgggccaggcgcaatgcaatgccagcaaagcgaataccgcggcggcgatcaaaaagcgaaaggtcaggaaaaggttgggatcggcatgatccgccaccgcccgcgcggcaataaaacccgtcgaccaaattaatatcaggaaaaacggcgcgataaatgcctttcgccgatcgcgtttttcacgcggggttatttccatatcactacctgaaagaatgcggttgatgaatgaaggcatactaaccaatttaacacgggcttaacagtgccgagcggacgcccaagttcagatggtgcacataattaccggtgaataatgaagtttcaatttcatataattcatcaagcttataattaattacgctacgttacgacaatgtaaattaattgctacatcgggtataaatattcccctcttggcgacattgtcgggataattcccctttgctagcctttctgaagccatttaattaacgggactgactcatggccgaaatcactgattttatgaaactggatatgcgtattggcgaaattatttccgtggaatataacgacaaggcgttaaaacccgcctataagctgcgcattgatttcggcgaggaaattggcattaaaaacagctcggcacaattatgcgaaaactatcaggaagatgacctgcttggcagaaaagtcatctccgtcgttaatttccccgccaggcgggttgccggatttaaatccgaagtgctggttcttgccgcggtcaccagggatcaaggcaccgtcttgctgaaacccgatttcgacgtggagatcggcagcaagattttataaccgccccatcattcgtgaggccaccgagaaatgcgacagttatctctgcttgatgaagttaagaaggcataccaggaacaccgttcagcctttatccccggcgctaccatgcaggcaatcctgctggcgctgggcgcgcggccggaagatttcgccaggctgcagcaggtcagcgccaatctggcggatgatcccacgctgcctttccgcaagtccagaaacggccgcttctgtttcgacttcgatcgcgcccggattgagcggctggagttccagcctttcgtgctctcggtcgaggaagacttcatccgctacgattcaggaaaggtgcgccatttccgcggcatcaacgacgatctgcagttgaatacggcctttcaggcgctgatgaaattcaaagcctacgtgatcgatggcgtgggcgtgacgccgcgcccccggcttaatcagaagatcaacaagttcgtctgcaccgtattcaacctgcgcaccgtcaccacgccgcagatgctgggcgaaccggcgctggaaggtgtgcacagcgacggcgtcgaccacaccatgacaaccttcctcggctgcgacaacatgaccgacgacagcgccaagacctttattcacgatatgcgcgaaaccagcgggatcaaattcgatcgggcccggccggaatggattttgggcgaaatacagcatcggcatttcctcgacaccctgctgattgtcgaccacgagcgcaaacacagcctctctccggtaaaagcgcaggacaaacgtaaggattcaacccgcgatatgctgatctttttcacccgcaaaccggtcgaagacggccacgtctctttcgcgtacgactcttttaaaccgcatatcgaaatcccgctgtcgatagacatggtggcgcgtgcgagctaacgcgctgccgggccggccgccatgatccctctgtgcggccggttcacgccaggataaacagcgctggattaatcaggtttttgtcgccgaattattatatcctgccggacgaaaatttttgcgggcgctcgctgccccacgcgccagccctctgcaggcgggccgtttatttcatgaaaacaggcagtgccataccgttatgaccaagagtttatccccgaaagacattatcgccctgggctttatgacctttgccctgtttgtcggcgccggcaacatcattttcccgccgctggtggggctgcagtccggcgaacatctgtggccggccgccctcgggtttatggtgaccgccgtcgccctgccggtgatcgccgtgatcgcgttggcgcgcgtcggcggcagcatcagcctgcttaccggccctatcggccgcaccgccggcctgctgctggcgaccgtctgctatctggcgctcggcccgctgttcgccacgccgcgaaccgccaatgtctctttcgccctcggcattgcgcctttcaccggcgacggcgccctgccgcagttcatctacagcctgctgttctttaccctggcgatgattgtgtcgctgtatcccggacggttgctcgataacgtcggccatattctggcgccgctgaaaattctggcgctggccgcgctcggcatcgccgccctgatctggcccgcaggcgcgccgctctccgccgtcggcagctatcaggcctcggcgttttccaccggcttcgtacagggttatcaaaccatggacacgctgtcggcgctgatgttcggttcgattatcgttaccgccgcccgctcgcgcggcgtcagcgacagcgggttgctgctgcgctacaccctgtgggccagcctgatcgccggcgtcggcctgacgctggtctatatctgcatgttcaaactcggcgccggcagcggcagcctgatcgagaatggcgctcaggatggcgcggcaatcctgcacgcctatgtacagcacaccttcggcgatctgggcagcgtctttatggcggtgctgatgttcatcgcctgcctggtaacggcggttggcatgacctgcgcctgcgcagactttttctcacgctacctgccgctctcttatcgcgcgctggtggtcatcctcgccctcttcgccatgctggtttccaacatggggctggccaatctgatccgcgtctcactgccggtgctgacggcgatctacccgccctgcatcgcgctggtgttgctcagcttcagccagaaccgctggcgcagcgccaggcgcgtctttgcgccagtgatcgccaccagcctggtgtttggcctcgccgacggcctgaaggcttccagcttcagcggcctgctgcccgcctggttcgataagctgccgctggccgaacaggggctggtctggctgcagcctacgctgctggtgctgttgctggcggcggcttatgaccgtgtgcgcggcgtcgaaagcgccaacgccgcgtcgtaagcgcgatttccgcccataaaaaaagccggtcatgatgaccggcttttttatcggcttgcgcccggcggcttacttcagcaacgcctgcgccttcgccaccacgttgtccacggtgaagccgaactcggcgaacagctgctccgccggcgccgactcaccgaaggtggtcatgcccacgatggcgccgttcagccccacgtacttgtaccagtagtccgcgatacccgcttccaccgccacgcgcgccgtcaccgccgccggcagcaccgactcgcggtacgccgcatcctgcttgtcgaacgcgtcggtcgacggcatcgacaccacgcgcaccttgcggcccgccgcggtcagtttgtccgccgcttccaccgtgatgcccacttcggagccggtggcaatcaggatgacgtccggcgtgcccgcgcagtctttcagcacgtagccgccgcggtacacgttcgccagctgctctgcggtgcgcggctgctgggtcaggttctggcgcgagaacaccagcgtggtcgggccgtcgttacgctcgatgccgtactgccacgccaccgccgattccacctggtcgcacgggcgccaggtgctcatgttcggggtcacgcgcaggctcgccagctgctccaccggctggtgggtcgggccgtcttcgcccagaccgatggagtcgtgggtgtagacgaacacattgcgcagcttcatcagcgccgccatgcgcaccgcgttgcgggcgtattccacgaacatcaggaaggtcgccgagtacggcaggaaaccgccgtgcagcgcgatgccgttggtgatggcggtcatgccgaactcgcgcacgccgtaatgaatgtagttgcccgccgggtcaacgttcagcgctttcgagccggaccacatggtcaggttgctcggcgccaggtcggcggagccgcccaggaactccggcagcaccttgccgaacgcttccagcgcgttctgcgacgccttgcggctggcgatgttggccgggttggcctgcagtttttccacgaacgccttggcgtcggctttccagtccgccggcagctcgccgttcatgcggcgcttgaactcggcggccagttccgggaaggcccgggcgtaggcggcgaacttgtcgttccaggccgcttctttggcctgaccggcttctttggcgtcccactgggcgtagatgtcctgcgggatttcaaaggcggcgtatttccagcccagtgcttcgcgggtggcggccacttcggcggcgcccagcgcggcgccgtgcacgtcatgggtgccggccttgttcggcgaaccaaagccgataacggtcttgcacatcagcagcgacggcttgtcggtcacctggcgggcttcttcaatcgcggccttgatggcgtccgggttgtggccgtcgacgttgcgcaccacgtgccagccgtaggcttcgaagcgcagggcggtgtcgtcggtgaaccagccgtcaacgtggccgtcgatggagatgccgttgtcatcgtagaaggcggtcagcttgccgagcttgagggtgccggccagagagcagacttcgtgcgagatgccttccatcatgcagccgtcgcccatgaaggcgtaggtgtggtggtcgacaatgtcatggccagggcggttgaactgcgccgccagggtgcgttcggcgatggcgaagccgacggcgttggcgatgccctggcctagcgggccggtggtggtttcaacgcccggagtgtagccgtactccgggtggcccggggttttggaatgcagctgacggaagttttccagctcgcgcatcggcaggtcgtagccggtgaggtgcaggaggctgtaaatcaacatggagccgtggccgttggagagcacgaaacggtcgcggtcagcccagtgcgggttagtcgggttgtggttgaggtagtcacgccacaggacttcggcgatgtccgccatgcccataggggcccccgggtggccggaatttgctttttgtacggcgtccatgctgagtgcgcggatagcgttggcaagctctttacgagaggacatgttttactccaggtcggataaaaaaagcagtcaagttccctattttctcagactccacatcacaacggcaatccctaatgccaaatgagagcgagttcaccacttattagcacgattggacgctttttcggaataacactattctcgctccggctggcgtacactaggctcttgcgacacgatttcctccaggcaaaatgactcttttaccttgttaccttcacaggaagatggcgttatgaaaattcgtacctctttgattgcgttgggcattgccaccctggcaaccggctgtcaaaacctgaataccgaaaccctgatgcagtccggcgcgcaggcgttccaggcggcgaccctgagcaacaacgacgttaaggccctgagtgataaatcctgcgccgagatggacagcaaggcacaaatcgcgccggccgacagcacctatgccaagcgcctcaacaaaatcgctgcggcactgggcgacaacatcaacggcaccccggccaactacaaggtctacgtgaccaaagacgtcaacgcctgggcgatggccaacggctgcattcgcgtctacagcggcctgatggacatcatgaacgacaacgaagtggaaggcgtgctgggccacgaaatgggccacgtggcgctgggccacacccgtaaagcgatgcaggtggcttacggcaccgtggcgctgcgcaccgcggcgtcctccgccggcggcgtcatcggctcgctgtcgcaatcgcagctggcggatatcggcgagaagctggtcagcgcccagttctcgcagaagcaggaaagcgaagcggatgattactcgttcgatctgctgaaaaaacgcggtatcgatccgaacggcctggccaccagcttcgaaaaactggcccaaatggaagccggtcgtcagagcagcatgttcgacgatcacccgtcttcccaagcgcgcgcacagcacattcgcgatcgcatcgcggcagagaaataaccacgagaacgcccggcaatcgccgggcgttttttatcgtctcaatacagcgttttctgcggcggcccggcgaaggtcagcggcccgacctgcttcatgtccacctcgaccaccgacggccccgggtaattgatcgcctcggccagcacgccgttgaactgcgacgccgcgtccaccttccaggctttcaaccccatcgcttcggcgatctgggtaaaggccggcgtatgcagctcgttgtaatactggcgcccggcgaaatacttgtcctgaatgccacgcattacgccataaccgccatcgttcatgatcagcagagtgatgttcacctgttcctgcgccatggtcgccagttcccccaggcccagcgccaaaccgccatcgcccaccagccccaccaccttgcgctgcgggttggcaatcgcggtgccaatcgccatcggcagccccatgccgatagcgccggccagcgagtgaatgttgcacagcggcgagatcgcacggaacagacggctgccccagacgctgccggaaacggtgatatcgcgcaccaacagcccgtcctggggcagtgcggcgtcgatggcgtcattgagtttggcgtattcaccggactgctggcgcagcgcgctctccgcctgctgcaccgcccccgcgatttcggcatcccactcggcgttgaccttttcgccgggggccaaccgcgccgccagcgcggccagcagcgccacacagtcgccgttgatctgctcatcggccaggtagttgcggttggccgccgccggatcgatgtcaatctgcaccagcgggcgcggcagcggcagcgtccaggtacgggtttcattactgcgcaggcgcgaaccggccaccagcgtcagatcgcactgcgtcaggatcgcttcgatgctcggtgagttatggaacgcccgcaggctgcgcggatggctgtccggcagaatgccgcgtccgtgggtgctggagatcaccgccacgccggcgtccgccagcttgcgcaccgcgtcgccgcaggccaaggcgccgccgcctaaccaaagcagcggacgcttggcctgtttcagccgctgatgcagccgttccaccgccgcatcgtccgccttcggcagcggcgccggcgccaacggctcggtcagcaccgagcgggacaccaggctgctttgaatatcgatcgggatctcgaccgccaccgggccgcagggcacggtttgcgcatccaggatcgctcgctggatcactgccaccgcctgctccggcgaattgacacggtaagcgcgcttggagcaggcgcgcaggaagccgagctgatcgcgggtttcatgaataaaaccggcgtcggcgtccagataggttttttccacctggccggtgatatgcaacagcggcgtgttggcgttgagcgcctcaatcatcgcccccaccgcgttgccggcgccggcgccggtgctggtcaacgctacgcccaggccggagaagcgcccgtgcgcgtcggccatggtgaccgcccccgcttcgccgcgcgccggcacgaagcgaattttatcgcgctgccccaccgcatcggcgatcggcagattatgaatcgaaatgatgccgtacatcgccgacaccgcgtactgttccagagtccgggctatcgcctcgccaaccgtgattttatcgctcatcatctgccttcttagggtaatcgttattagggttatgcgtagaggtgtcggcctagtcgctccagcggttcacctgatggctcagcgccagatacacgcttttctgctgcatgtaggccttgatgccgttcaggcccttttcgcggcccaacccgctctccttgaaaccgccgaacggcgtggaaatcgagaacgttttgtaggtattgacccagacggtgccggtttccagccgctccgccagcgccatcgtgcgagggaagtcgcggctccagatgccggccgccaggccatacaccgagtcgttggcctgttcgatcagctgttgctcgtcgtcgaacggcagcgccaccagcaccgggccgaagatctcttcctggcaaacgcgggcgtcgttgttcaagccttcaataatggtcggcaggtaatagctgccgctcgccagttgcggatcggccggcgcttcgccgccgatgaccacccggccgccctcctgccgcgccagcgccacgtagtccgccacgctttgccgatgtttggcgctgatcagcgggccaagatgcacgcccggcaccagcgggttgccgatacgcagccccgccgtcagttcggtcaagcgcgccagcagcggctgatacagcgaacggtgtacgaacaggcgcgagccggcgatgcacgcctggccggcggagctgaaaatgccgtagcagatgccgcgcgccgcctgttccagatcggcgtcctccagcacgatggtcggcgatttgccccccagctccagcgaggtggggatcagcttatcggcggcgatatgcgccaaatggcgcccggtgctggtcccgccggtaaaggaaatcttcttcaccagcggatggcgcgccaacgcctcgccgatcaccgaacctttgcccggcaacacgctgagcagcccggccggcagtcccgcctgttcgaacagctcggccagcttcagcgccatcagcggcgtggcttcggccggtttgagcaccaccgcgttgcccgccgccagcgccggcgccaccttctgcatttcgctggcgatcggtgagttccacggcgtaatggcggcgatcactcccatcggttgatactggctgagggtcatcacctcggcgctgcgcggggtcggcagctcgccttccaacacctcgcaggcggcggcgaaatagcgcgcggtcgccgccgcgctggccaccaggccgcgggtttccgccagcggtttgccgttgtcgcgagtctgtagctcggccagctgttcctgctgcgccaggatcaggttgctgacgcggtagagaatcgaggcgcgttggtgcggcaccagtccgcgccactccggcgcgcgccaggcgcgttccgccgcttccaccgcctcgttcacgtcctcgacgttagcggcgcgcagccgcgcgttgacgctgccatcggccgggaataccgaagccatctcttcgccacgcccttcacgccagcgcccggcgacaaaaatattcaatcgttccatgctccgctcctgccgttcaggcaataaaaccgccgtccaccagacggcggcaggcttgtaccgcgctcagcgccgccagggttgatgttttgggattgctcgccagcgggttaccgctcagctcaatgtgaaactcgccaaagtcgccgcacacctgcaggcgatgggtattgcgccgggtggcgggatcgacctgcaggcgcacccgggtggcgtccatccccagaccgttgagcgcaatagtggccgccacgttggcattggccgggaacaaacgcgccgcttcgcgcgccgagccttcaaaaaatacctgcgcctcgcgcaccgcatcgaggtcgatcagttgctccgccgggctgccgcgccagctggccgggctcttgctggcctgataggtcacgctctccaacccgccttcacgcgccgacgccagcccgtccatccccgccaccgcgccggacagcacgatcagttgcccgtgatggctgcggcaaacctgctgcagccgctgttgcaatgcggcgtccgccagcgcgccggtcgagatcaccgccagcggccaaccgcgctgcagcaccgcctcgccaaactccgccaccgcctgctggctggcgcactccagcaccaaatccggccgctgcgaacactgctccggatgggtcagcgcctgcacccgcccgccgaaggcctcggcgatcgccgcatgatgagctgcgcgcgccaggatccaaccgacctccacgccttccggcagacgggcgatcacttccttcgccattgcgccgtagccaatcatcatgatcttcttcatctttctcggcccctgctacacatggcggttaaagccgccggaaacgtccagcgccgcgccggtggtaaaggaagccagcggcgaagcgaggaacaacagcgcctgcgccggctcctgcggcttgccgaggcgtttcatcgggatgccgcggcgttcggcgatcgccgccgtccactgctcccagctttgatctttatcgctgcgatcgtcgaaacggcggcgccactggcccgactccaccatccccagcaagatcgagttaacgcgaatgcctttgcccaccagctctttcgacagcgtcagcgtcatgttgagcagcgcggcacgcgccgccgaggtggcgatcatgtgctcttccggctgcagcgccagcagcgagttgacgcaggtgatagacgcgatcgccgatcgttccagcgccggtaagaacgcctgcaccgggttgatcacgccgaacagcttcagctcggcctcatgcagccaggcctcgcgcggcgtctggtcaaaatgggcgacgaagccctgaccggcgttgttgatcagcagatccacgccgccgaaatgcgccgtcacctgagcggcgaactgcgccacctgctgcgcgtccagtacgtcacagcgcagcgccaggatatccgcctgcgggaagtccgcgcgcaggctggctgctgcgccggccagtttgtccggatcgcggccgcagaacgccactttcgccccttcggccagcagcagcttcagggtttcgaaaccgatgcccgacgagccgccggtcaccaccgccacccgatcctcaagctgaaaattcatcgttggattgctcccgtaaagtcccgcagatagcggttgaaacacgccggcgcatcgaggtagctggcatgaccggcggcggcgatcagacgcagcgccgcgtcctgttcacccgccagctcggctgccttctccggtggcgtaatgcgatcctgttcgccgcaccacacctccagcgggccgcgatagcgcgccagatagcggccgatatcatcgttagccagcatccaggcggcactcagaaaaccgtcgggatcgagctgctgcatgccgttgcgcacccaggcgatatcctgcggatccgccccttcacgcagcaaggccgccgcccgctgctcgccgtagcccaccggccccagcgtctctatcatctgctggcgctggccgtacacctgccgacgcttttcctccggcgccgtggcatagccctgcgccggatccgccaacaccagcccacacagcccatccggatagccggcggcataggcgctgccgatcagcgcccccagcgaatggccgacgatcagcggctgcaccagctgcagctcatcaatcagcgccgccaacgccgccgcataaccggcggcatcggcctgcggatccgccaacggcaggctgccgccgtagcccggcgcgtcccatgccaccagacggtggccgtccgtcaggccgttatcgttgaactgcttgatccacgaggcggatccggagctgatgccatgcagcaacaccaccggccgcccctgcccggcctcgcgccagctcagggtgtacgccccgcagcgcgcccgttggcgttgcgccaggccgttcatcagttgcgcttcactttggacagcgggtgatccgccggataggtcgggatctccggcttggcggtgccgagcatcacgcacatcagcgcctcttcctcgccgtggttgaacaggccgcgatacacccccgccggcaccgagatcagatcgcgctctttcagcctggtttcgtaatactcttcgccatcctgaatcatcagcgtgatgctgcctttcagcatgaagaacacttcttccacgtcatcatgcaggtgcagcgggccctcgcacttcgaaggcagcaccatggtggagaaggtgaagttgcctgccggaatggtgttggcatcgctggccacgccggtggcgccggtgccgatgtagcgcatctgcgcacggcggtatttcgggtcgaagtcggcctggaatttcagcgcgttccagtcatatttgcggccctcgaaacgggcgatgcgcgactccacccagttttccatcgacagatcctgcggcttgacgccggctttgttctcaacctgagacatgttgtcactcctctgttgaatcgattgattaatcagtactttctcagcaacggcagcagaatgaggcagccgacgaaagccatcaccaccaggaacagcaggccgttatccatattgccggtggcggcgatcagcgcccccatcagcaccggcgccagcgcaccggcaaaattgcccaatccgttgaagatgccgccggcggtggcgctcaccttgctgctggtggccttcgccaacagcgcgaaaatattcggcgcgccggcgccccacataaaggtgctgaaggccatggcggcgatcacgctgtaggtgccctgcaggtgcaacaccaccgccagaccgaggccggcgccgcacagcgacaggaagcaggccagcgcgcggcgatccagcttgtccgacagccaggcgcccagcacttcgccgagcagcatggcgatgaacggcagcgaagagaggtaaccggcatgttccagatgaatgcctttgcccttgatcagatagctcggcagccagccgttcatgccccacaggtaggtcaggaaggcgatgttgaacaggcaaatcatccagaaatgcgggctgcgcaacagctcgcggcggtgctgtttgcgttcggacaccgccggtttggccgccgccgccggacgcgcgacgttcaggtggcgcatgccgaacagcaccagcaacatcaccggcagtgtcagaaacgccataaagaagaaggtggcctgccagtcgaaggtattgagaatgtacagggtgaccgggaagccgagcgcggcacccagcggcgtgccgagcaaccacagcatggtggcgcgcgcctgcagctgcggcgggaaagcctgacgaataatggcgtaggccatcggcagcagcggcccttcggcgatgccgagcagaatgcgcagcgtcatcatggcgtgataggaacgcaccagccccatcaacaccatcagcacgccccacaccaccatcatgccaatcaataccttgaccggattaagccgatcgccgatgccgctgagcagcatggaggaaatgccgtaggagaacagaaacgcgctcatcagcaagcccagccgcgccgggtcaaaaccgatgcccaacgcctgctgaaactcggcgtcggaaaacagcgccgcgatgctgatcttgtcgaaaaacgccagcagcacgcaggcaaacagcgcgatcggcaccgaccagcgcacccgctgctgcggattttcggcaacggtttcccccgcccgtccagcgcgggcgtcaatgtcttgcgtagtcataaaacgctcccgaggttcgggcgttatttcaacgccatcaaagaaaactccgcatccgccagttgctgcggatccagcacccggccactcgccaaccaacgcttgccgagcttgatggtacgcgcgtcgttgaacgccaccatctgcaccagctgccgatcggcgttcagcgtgaagaacacctgcgactgcggcgtgcggcgcaccacatggtgcacaccgccgctcggcacgccgaggatctggatattgacgtcatattgatccgaccacagccaggccacgtcgtcatacggggcggcgaaggcgtcgagcatcgcgcaggcggtgctgatggcctggttttgcgcgtaggcccaggactgcaggcacaggccaagcgtcgggtgacgcgccacatcgcccgcggcgaagatcgccggatggctggtgcgcccctggccgtcgaccacaatgccggactcgatcgccagcccggcgctgcgcgccagttcgagattcagctcgacgccgatccccaccactaccagatcgaagacctgcggatcgctgacttcgctgccgatccaggcggcgccgtcgcgatcttccagcgagatctcgccgcagccgcacagcaccgtgacgccctgctggcgatgcagttcgagcaacgcctgtgagacatcggcgccgacgctgcgcatgcacagcgcaggctggcgttcaaacaccgtcacctcggcgccgagacgccgcgcggaagcggcgatctccagcccgatccaaccgccgccgacgatagccaggcgacggcagccctgcagcccctgccgcaaccgggccgcatcgtcccaggaacgcagcgtcatcacgcgcgggtgctgcgcccaggcagcgctcggcaaacgcggccgcccgccggtggcgatcagcaactgctcgaactgcagccgttgcccgtcgctgagcgtaacgatttgctgttcagcgtcgatggattcggcgcgcagcgggcggcgccagtcgatattcagctccgccaccgtctgttcgctgaacagccggctgaggggcaccgcggcatccagcagcgccgctttcgacagcggcggccgctcgtaaaaatcgtagggttcgtcgctgacaaccgtcagccggccgctgtaaccccggtcgcgcagcgtcttggccgcccaaccgccggcctggccgccgccgatgatgacgatgcccgcctgctccggccggttcataacgcctccgcctttttatgctggcggcgcgtgtcgtgatcgatgccgccctctaccgcccattcggtgaaggagaccagcgaatgttccagctcgcgcggctgccagttttccgtcagataatcgtcgttggtgtagtactcgaacgcgccgccggtcgggctgttgacgtaccagaaataggccgaggagatcgggtgacggccggggccgataaaggtgctccactgctctttgttcatggcaatgccgccgccgatcacttcgtggatatcgcgcacggtgaacgccacgtggttcaggccgcgtgggcggttcggcagcttcagcaggaacaggttatggtggccgccgcgcgcctgggtgcgcaggaagacggcgcgatcgatatagcgatcggaaacctggaaatccaacagctcgcggtagaaacgctcggtcgccgccagatcttcaacgaagaacaccacgtggccaatgttgatcggctgcgcctgcgaatagaccgggctgggttgatcgatgcggcgcacgtcgccccattggttgatcggcgtgaccggcacctcgaccgcctgctggcggctgacgacgaagcgcagcgtcatgccgttgggatcgaggcactccagctcttctcccacctggcggaagccgggcatcagcgccaaacgcggctgcaggcgcgccagatcggcgggcgaggccacgccccaggtcatgcggcgcagggtggaaccgccttcaaacgccgcaggcagcgccgcgctttgcagcggatgcaggacaacccgcgccccgctcagggtagtgaattcgcgcagcgcttcgccccaatgttgcgtggcgggctgcaggccgaagtcttgcatgaatttttcgcaggttggcagatcttcgacgccaaattccagtttttcgattccgattacgctcattgttcagcctcacgttctcgctgcatacggttttcaggcatgagtgaaccccggcccctgtttgctacgggccttgtccctgcctgagtaaaagagtcggtcctgtcggttagccgacgttggcctgcggcggcgcgccgaggaagccggaaattttctccgccgcgtcgcgcacttccatgcgcagccgctcgcgatccgctttcgggatctcatcggacggcaccatgatgctgaccaccgcctcgacccgctgctcgcggttgaagatcgggtagacgatcgaggagatgccgtggcggaagaacgattcgccgatcacatagccgcgcgccttgtcttgctgcaccatctgccacagcgtttcgcgatccgccggggtgcccggcgcattgcccggcagctgcgcgtctggatacagttgttcgaactcgctgcgagtcgcgctggtcaacaacatgcggccgagcgaggtttggtgcaccggcaagcgggtgccgacgctgacttgattgatctgcgaaccggcggcgctgacgcgggcgatatagatcacgtcacgcccgtcgcggatcgccagatggctgctgcactggctgcgatcgcgcagctgctcgatcaccggctggccggcctgcgccacgtccagcgacgcgatatattcgaagccgagacgcagcaccttgatgccgagcgcaaaggtgttggtgcgcggattgcgctccagaaagccgaggtgttcgagcgtctgcaccacgcgataagcggtggccttcggcatatcgaccaggcgatgcaactcggcgaaggtcatctccttatgctgctcgccaaacgccagcagcaactgcaacccgcgatccagccccgggatcagatatttacatgcttgctcgtccgccatctctcgctcctgcgctgtgcgcctgccctgcgggccgtcagttgaatacgaagccgccgttgaccggcagcagttgaccggtgacgaaatccgccagcggcgacagcagataaagcaccgtaccgttcacatcgtccgggtgctgcgccccggccaacgcgcgcccctgctcgtacagctggtggcgctcggcggggacatactcggtagcttccacccgcgtcaggcccggcgcgatggcgttgacgcagatgccctgcggacccagctcacgcgccatcgatcgggtcatcgcgatcagcgcgcctttgctggcaacataggccatcaggcgcggcgcgccccacagcgcggtgtccgacgccacgttgacgatcttggcgtgcgggttgcgcgccagcagcggcaccgccgcctggctcaccagccaggtgccgcgcacgttgacctgcatcacccgatcccacagttcgatatcgtattccatcatggttttaccgccgacgccggtcgccagcgccgcgttgttcaccaggccgtcgatcccgccgccggcggcgatcttctcgaacgccgaacggatcgaatccggtgacgccagatcgatggtttgcgtttccacctgagcaccctgctcgcgcagcgcggcaccgctcgccgccagctcatccgccaaaatgtcgcacatcaccacctgcgcgccggcagcggcgatggcggcggcgaagctgtagcccaggccgcgcgccgcgccggtgaccacgatgcgtttaccgttcagcaggccgttcactgcgccgcctcccgctcgcgcagcgtcgccagctgtttttgcgcctctttctgcatcaggcggcgcaggcgagaaagaccgacgtcgtgctggtacagatattcgcggccgcgggcgttaggcgccatgttctcaagcacgatgcgatcctgctcgagcacgtcccaatgcaacgattccagacgattgcggtacatgaagcgccacatgtcgcgctgccagtccttgaccttacgaatgcgccagaagaatacccggcagtgatccttgtcctccggcaccaccatgccgatgatccagaagtgaccgcccggcccgaagcgcttcttgtacgggatcgacaggcgcatccaatacgcgccgctgttgccgaattccacccagtcgaagttgacgccgatctggccgtttttcttgaagatgaagccgctgtcggtcggctccagcgccatgtccgccttgcgatccccttccgccatcgagtgtgaagaggagtgcaggtaggtgccgtgcatcggatccatcacgttttccagggcgtactggtagttgcagttccagctggcggtgcacagaaaatgactgtacgacgcttcgtccgccagctcttgcgggaaagtcagctccgccggcgtttcatccgccgtcacgccgaaatagaggaacaccgcgccataggcttctttggccgggtaagatcgcaggcatttttgccccaccagcgggcagcgatccaccgccggcacgtctttcaccgtcccgtcgccgccgacttccaccccgtgataccaacaggcgatgcgatcgccgaggttccaccccatggaaagccgcgcgccacggtgcgggcagcggtcttccagcgcatggatctggccttcaccgtcgcgccacaccacgatttgctgccccaggcgggtgataccgaccgggttgttgcccacttcccagctggccagcaccggataccacatgccgcgcagcccctggtcaagatagtcctgcaagctctgttcggaggatgttgtgtttgctgtcattgtcttctcccgggtgtcgctcagaaaccgttaacgtgaaggaattcgcggaacgtcgcctcattccacggctggccgctgcgatcgaacagacgacgctgattcaacgcgctgacgatctgctccagctcttccgccccctgatcgaagatcgtttccagcgccgccaccagggcagtttcgaagccgtccggcacccgggcacggttttgccagatgacattgcggaactggcccggctgatggatttgaccgttgccgccttcgcgggccggcgtcacctgttgggtgtccggcagccagggattgaaatcggtgatgtgctgcatgattactcctccgcgataaaagtgatctggatttggttgtcgaccacccgggtgggataggtttgcagatcgcggccgcccggctcgcgcaggcactggccggtacgcacgtcaaacagcgcttcgtgcagcgggcactcaaccttgccgtcgtctacaaacccctggctgagcaaggcataagcatgcgggcagacgtcttccagcgcgtagtagttaccgtcgagcaggtacaccccgatctcctttccttccactttgccggagaaaggaaaatcttctttcacctgagacacttcgcacacattcttccagctcattgcttttatcctctatctgattgtttcatatatgaaactcagtttcttatttaatacagccactataagtctggcgaaactttcgtcaagcgagcggaacggcaaatgttaatgaaaggttgtttaaaaatgacaaatgcgggaaagatcacgaaatcatgcaccgatatgaaaaacctatgtcagttgtgcgctccctcgctaatttatggcaaaaaatgcgttgatcccggcggcgtattgcgcgtaaaagtgttttctctctgtcttttacaccctatttgataacaataaatttacatcaatcagccccatccccgcgtttgcgccaaatggcatcctcgggtgagtttactgctgcctgaattcgtcaaccgctcgcactgaggaacgcgccgtgcaacaacgtcaacgctggtttggggtgatcgccctgctgtttctgatcgttatcgcctatgcggatcgagttaatatcgccgtgatgttggtcaatcccgacttcctgcaacactttcaactcggcggtgaccgcgctcaccagggcacgctgatgacggtgtttttattcggttacggcctctccgccatgttgctgacgccgtttctggaaacgctgatgggttaccgccgcgcgctgacgctgagcgtggtgctgtgggcgctgctcaccgccgcctcgccgctggcgggatcgctgctgttgctgtgcgtggtgcgcgcgctgcttggcgtcagcgaagggccgctgttctcgctgaaaaccatgtacatcagcgatcatttcgctgccgacgagcgcggcaagcccaacgcggtcagcgcgctgggcgtctcgttggggctggtgatcggctttccgctggtgagttttctgatggcgcacttcggctgggcgatgtcgtttcacctgctggcgctgctcaacctgctgttgggcctgatgctggtgcggctgttcgttcatccgctcgccttatcttcatcttcacgccccgccgatccgcaaccggtgctaagccgcgtctggcacacctttgcgctggcctggcgcacgccgatgctcggctggatcctgctgatcgagatcgccacgctcagttacctgtggggctccagcgcctggctgccggcttacctgaccgatgaaaaggggttctccatcaagcaaatgggctggatggccgcgctgcctttcatcgtcagcatcgcctccaaatacctcggcggcgcgttgctcgatcgcatccgtccttatcaggcgccgctgatcttcgtctttggcggcgcggcgaccgcactgtgcatctatggcgtaatgaacagccatcagcttggctggatcgccttcttcctgctggcggccaacgcctgttggggcgtgcagggcgcggcgatccccacgctgctgcagcattatgcacggccggaggcggtcggcagcgcctatgggctgatcaacggcatcggcaatctgttctcggcgtttgtgccgatggtgatgggcatggtgatggccagccagggtaaggtgtcctcgggctttgcggtgctgattgcctcacagctgctgacgctgctggccggcggcgcgttgtttggccgcatgttgctggcgcggcaggtgaagcgggcataaccccgttcccctctcctccgtagcggaaaaccgaatgctttaagtgggtgctcagggatctggacgccaacaaccagcagacgggggacatcccccgtcgccgggttgccttaccgttcggattcgtaagccaaaatggccgcaacctccgtgttgcccgatcggatccgcagctcacacagcgtgctgcgcgttatccatgccagtgatattaccgtggcacaaataaccaccaattttaacaggctccgtttgttcggcatcatgccttcttctccttgcctcgcggcgggtaagaggctaacttaacgttgtctggcgttagagttggcctcgggttgatgaatatcgactcggggcttttctctttgtatctttcgcagaagctccagagacaaagatccagagcacccgcgcgcagtatattcatccaccccgctatcccggctccctttttcctgactctttttcatttctgcgcaggattgcgcaaaggcgttgcaacaggctgaaaatcgcagtgcggatggcgacaaacgaaataaaaaaagcggagattgatgacaaacctcatgccattgctgggcttgcacagagaaacgtataaaaaacaaataaaattaatttattaactttctgttgatgaccgcaagggaggaaaaaccgaaagcgttgagagggtgctcagggatctggacgccaacaaccagcagacgggagacatcccccgccgccgggttgccttaccgttcggattcgtaagccaaaatggccgcaacctccgtagtgcccgatcggatccgcagttcacacagcgtgctgcgcgttatccatgccagtgatattaccgtggcacaaataaccaccaattttaacaggctccgtttgttcggcatcatgccttcttctccttgcctcgcggcgggtaagaggctaacttaacgttgttgggcgttagagtaggcctcgggttgatggatatcactcggggcttttctctttgtacctttcacgcaggctccagatacaaagatccagagcacccgcgcgcagtatattcatccaccccgctatcccggctccctttttcctgactctttttcatttctgcgcaggattgcgcaaaggcgttgcaacaggctgaaaatcgccgcgcggatggcgacaaacgaaataaaaaaagcggccccaattcgatgggagccgctttttcagcgaggcgtggcctggcgtcaggcgtgtttcttggccgcctgcaggtacagcatctccagacccaacgtcgccgcggccagcgcggtgatctcggactggtcataagccggcgccacttccactacgtccatgccaacgatgttcagcgactgcatgccgcgcaccagtttcagcgcgcgatcggaagtcagaccgccaatcaccggcgtgccggtgcccggtgcgaacgccggatccagacagtcgatgtcgaaggtcaggtacaccggcatatcgccgacgatgcctttgatctgggtcagcaggtcgtccacgctgcgatcgttcacctgcgcggcgtccagtacggtaaagccgttgtcatgatcgaactcggtgcgaatgccgatctgcaccgagtgatgcggatcgatcaggccttcgttcggcgcatggtagaacatggtgccgtggtcgaacttgctgccgttggcgtaggtatcggtatgggcgtcgaagtgcaccagcgccagcttgccgaaatgcttggcgtgcgcgcgcaacagcggcagggtgacgaagtggtcgccgccgaacgagagcatgcgcttaccggccttcagcagtttctccgcgtgcgcctgcagcttgtcgctcatgtcctgcgcatcgccgaagttgaacacgatgtcgccgcagtcaaccacgttcaggcgatcgcgcagatcgaagctccacggccaacggttgccttcccaggccaggttggtggacacctggcggatggccgccgggccatgacggccgccggcgcggccggaggtcgccatgtcaaacggaatgccggtgatgacccactctgcatcgctgtcgtaaggcatgaagttcagcggaaagcgcaggaaaccaaaggcgttggacactaatgaattatcggactgatggcctaaggtgctcatagtaaaccctcgtagttcaacaagttgccgggcgcagacgccgggccgttacaaaaaaaaaatccctcccgcgtcgttagcccgacgagaaagggatttattcgatgtgtgtttcggtgctaccgatacggcagattatggctgcattttgctcatgcttcaagggggccgacatcgcccccctgaagagggcggttactcgtcttccagatacgtgtaaccgtacaggccggcttcaaactcttccaggaactgcgcctgcagctcgctgtccagatcggtttctttgacctgatcgcggaatttggacagcagcgcgctcggatcgagctgcacgtactccagcatgtccgccacggtgtcgccctcgtcggacaattcggtctcgacgctgccgtccgggaacacgtacacgtcaaccgaggcggtgtcgccgaacaggttgtgcatgttgccgaggatctcctgatacgcaccgaccatgaagaagcccagcgccggcgggttctccggatcgtacggcggcatcggcatggtggtcgccacgccgtcgccgtcgacgtaatggtcgatggtgccgtcggaatcgcaggtgatgtcgagcagcaccgcacggccttccggcggcttatccagcccttccagcggcagcaccgggaacagttgatcgataccccaggcatccggcatcgactggaacagcgagaagttgacgtagaacttgtccgccatgcgctcttgcaattcgtcgatgatcgggcggtgcgcgcggttgctcggatcgagctgctgctggatcttgttgcagatgttcagatacagctgctcggcccaggcgcgcttggtcaggtccagcatgccgtgcgcatattgggtatgcacatcgtgcagatccatctggctgtcgtgcagccattcacgcagcgagcggcggttctccggctcgttcatttccagccaggtttcccacatgctttccagcgcgcgcggcgcgtcggcttccggcggctgcggttcgctgaattcgttgcgctctacgccgatcacattggagaccagcaccgtgtggtgcgcggtcacggcgcggccggactcggtgatcaccgtcgggtgcggcaggccgtgttcgttacaggcgtcgccgatgccccaaatcacgttgttggcgtattcgttcaggccgtagttgaccgagcaatcggactgcgagcgggtgccttcgtagtcgacgcccaaaccgccgcccacgtcgaagcactgaatgttgacgcccagcttgtgcagctcaacgtagaagcgcgccgattcgcgcacgccggtggcgatatcgcgaatgttggccagctgcgagcccaggtggaaatgcagcaactgcaggctgtcgagacggcccgcttcgcgcagggtctccaccagcttcagcacctgcaccgccgccagaccgaatttggacttttcgccgccgctcgactgccatttgccggagccttgcgacgccagacgcgcacgcacgcccaggcgcggtatgacgttcaagcgttcggcttcttccagcaccaggttgatctcggacatcttttcgatcaccaggtacaccttgtgccccagtttttccccgatcagcgccaggcgaatgtattcacgatctttataaccgttacagacgatcaccgagcgggtcatgccggcatgcgccagcaccgccatcagctcggccttggagccggcttccagccccagcggctcgccggaattcaccagcgattcaatcacgcggcgatgttggttcaccttgatcggatacaccaggaaatagccgccctggtaaccgaaggactcgcgcgcgcgtttgaacgcggcgttgatcgaacgcaggcgatgctgaaggatctgcgggaagcagaacagcgccggcagacgttggccgtcttgctggcgcgttttcaccagttctgccagatcgacgcgcgcctgcgggacatccggatccgggcacacgctgatatggcccagctcgttgacgtcatagtaattgttgccccagtaggcgacgttataagtacgcagcatcttgctggcattacgatcattcatggcaacctcctgcatggagcgcaaagataaagactcgcccgcaaccggcggacggtgaatcaacagatcatcagacatggttcgcctcacattccgtactgacgaaaccgccagccactatcgcagctacaacccgcgagaacaacccaacaagccgcgccggcggcagcgaagagaactgccgttcgcggtcagcgatcggtttatcactcatataattgtaagacaccctgttcaaacctcgtgaatcgggccaagaaacatcccacaggaaggctgcaggctacccttgttcagttcttcagacgaccgttagccggcccgagaatcctgagtagcggccaagtgtttatcgcacctggtaagtgacagagagacaagacgggaaatagcagaagaatgtgcgccagaacggcactgctgttgggaaccaacaaccggtagacaacggatcattaatccaaccacctccacgcgcgccgttcggagtgaacgacccagcctctaaaatagtgtaagaacgtgaccgttcgatgaagcggcggcgccacggcgaacgcccgcgacggataatagcgcaatgccggcgaatgcaaagcggaagtttatcgtaccttcccccacgccagaccgccgtactgtgcagcaaatgaaccgcgcgcgcagtttataccggtaagcaggtgaaaaagcaaaatgaaaattcgccgaaaactgtttcaagcgatgaaaatggcgccaacccgtttgcgcaaaagagcgaaagcgcaaaaaattactggcaatctggctaaaccctgacctaaaatagacgtccagatgttaatccatctatactggttaactgataaactgcttaacggctttgcctgaggggcgttgcaggatgcatctcgcgccatcagcggaagacccttcgcttcgatgccggatctccagcgctgtgcagtaatttctaacccgtcttatgcaaggtaaagaacacaatggctaaacacctcttcacgtccgaatccgtctccgaaggacatccagataaaatcgccgaccagatctccgatgccgtcctcgacgccatcctggaacaagatccgaaggcgcgcgtcgcctgcgaaacctacgtgaaaaccggcatggtcctggtcggcggtgaaatcaccaccagcgcctgggtcgatatcgaagagatcacccgcaagaccgtgcgcgagatcggctacgttcattcggacatgggctttgacgccaactcctgcgcagtattgagcgctatcggcaagcaatccccggatatcaatcagggcgttgaccgtaccgatcctctcgagcagggcgccggcgatcagggcttgatgtttggctacgccaccaacgaaaccgacgtgctgatgccggctccggtgacctacgcacaccgtctggtgcagcgccagtccgaagtgcgtaaaaacggcaccctgccgtggctgcgcccggacgcgaagagccaggtgaccttccaatacgacgacggcaaaatcgtcggcatcgacgccgtcgttctgtccacccagcattccgaagacatcgcgctgaaagatctgcaagaagcggtgatggaagagatcatcaagccggtactgccggcggaatggctgacggcgggcaccaaataccacatcaacccgaccggccgtttcgttatcggcggcccgatgggcgactgcggcctgaccggacgtaaaatcatcgtcgacacctacggcggcatggctcgccacggcggcggcgccttctccggtaaggatccgtccaaggttgaccgttccgcggcttacgcggcgcgctacgtggcgaaaaacatcgtcgccgccggcctggccgatcgctgcgagatccaggtgtcttacgctatcggcgtagcggaaccgacttccatcatggtggaaaccttcggtaccgagaaagtgccaaccgaacagctgacgctgctggtgcgcgaattcttcgatctgcgcccatacggcctgatccagatgatggatctgctgcagccgatctaccgcgaaaccgccgcctacggccacttcggccgcgagcacttcccgtgggaagcgaccgacaaagctgagctgctgcgcgatgccgccggcctgaaataagccccgacatcaacatgaaaaacggcgagccaaggctcgccgttttttttgagcggatgggtgctcccggatcaacgcatcgactgccagcaagcggaggcaccgcccccgccgccgggttgccttaccgttcggattcgtaagccaaaatggccgcaacctccgtagtgcccgatcggatacgcagctcacacagcgtgctgcgggttatccatgccagtgatattactgtggcacaaataaccaccaattttaacaggctccgtttgttcggcatcatgccttcttctccttgcctcgcggcgggtaagaggctaacttaacgttgtgatgcgttagagtaggcctcgggttgatgaatatcgactcggggcttttctctttgtatctttcgctcgggctccagagacaaagatccagagcacccgcccgcagtatattcatctcaccaccacgcctcgtgttccttttcgcccccaatatcatttttgcgcgaccgctcgcagcgccttacaacaccatgaaaaataaaaaaaggctcagcgacgctgagcctttgatggcagaaaaagcacggccgagatgccgattacgacgtctgcttacgcaacagataaacgaagtacggcgcgccgataaaggtcgccagtaacccggcggggatctgatacgggaacagcagcatccgcccgcaccagtcggcaaacaccatcagcaagccacccaacagcgcggcgatcaccatctgcggcagcgcgcggcggaagcccagcatgcgcgccatatgcggcgccatcagcccgacaaagctcagcggccccacggtcagggtcgccatggcggtcagcgtagcggccagcaacaggatggtcaatcgcgcaggtgtcaaggcgatccccaccgaacgagcggtagcgccgccaagcggcaggatggtcagccaacggcggcacagcggcgccaataccatcaggcaggcggccaccagcgcggtgcgcagcgcctgcgccggctccaccgaataggtcgagccagagagccaggtcagcaagccccccatacgcggatcgccgctggccaacagcaggaagatgacggtggtaaaggcggtgctgagcgcgataccggcgagcagcatgcgttccgtcgagaaaccgccgcggcctgcggcgatcatgatgatcagcagcgtaacggccgcccccagactgccggcgggcagcagccaaacgaaggcgtcgcccggcaccataaacaacatcatcacggcgccaaaagcggcgccggaactgatgcccaacacttccgggctggccatcgggttgccggtcagtttctgaatcagcgtgccggcgaccgccagcatcatgcccgcggccaacgccgacagcacccgcggccagcgccacggcagcagggagtccagttctgcccccaggctccagtgccagccgccggcatttttacccagcatcagcgccagcgtcaggccgatcagcaatacgaggccacccagcaggatccagccgggcagattcccgcgctcggcaggcaccttatcgcccaggttcatcggcggcggcgtggcggcgctgcgcaaacgcggcaacagccacagcagcagcggcgcgccgaacagcgcggtggccgcaccggtcgggatctcgcgccacacctgcgtcaccccgagcatcacctgatcggtcagccacagcaacagcgcccccagcaacggcgccagcatcatgcggtgcgccagacggcgcgcgcccagcatcttcgccatcagcggcgcaaacaggccgataaagccgataacgcccacggcgctcaccaacatggcgctgaagatgatggccagccccagggcgcagaagcgcgccatcgacagccccaaccccaggttgcgcgccacgccgtcgtccagccccagcagcgtcagcgggcgcagcaatagcgccgccagcgcaccggccaccagcaaacgcggcaggataaactgcaccgtgctccaatcctgttggttcagcgcgccggtgccccacaggaacatgccctgcagttgatcgtaatgaaacagcgccagcaggctgttgaccgcgccgcagtaaagtcccagcaccagcccggccagaatcagcgtcaccggcgacatccgcttgccccaggcgacgccgaacaccagcccgcccaccacaatcgcccccaccatagcggccaactggcgggtgaactcgccccccggcagcacccacagcgtggcgatggtcaggccgagctgcgcgccggcggccacgccgagcgtcgacggttccgccaacggattgcgcaacacctgctggaacagcacgccaaccaaccccagaccggcgccggccaacagcgacaccgtcaaccgcggcagcaggctgtaatggaacagcatttgccgcacgtcgtcgatgttcggcgcgctgagcgcccgcacccattgcgccggcggcagctgctgcaccaggttatatatcgtcaaaccgcctgccgccgccagcaacagcaagatcagcgtcagcggcaatttccggatgcccgcattcatgacgcactctcctgagcctgcgccaacaggcggcaaaaccgcatcgtcgacagcgtagcgccatagaaccacaccgccggcacctgccgcagctggttttgccgcacgaagggcaacgactgccacagcggcgtcgcgctgaccttgtccatcatcgcctgattgccgtgatcgagataaatgacccgggcgttacgcaccgtggccaatcgttcaatccccaccaccgccgtgccccaaaaatcggttggctcctgccaggcattgcgaatgccgagttgatccatcgcttcctggaacagacttttctggccgatgatcagcgcatggcgcgtgtcgatcagcgaaaacaacagcagcggttgccgggtgtagctttgcaggcgctgacgcgcgtcctgcataaagctgtcgaactgcgccaggtggtttaccgcccggctttctatgcccaaccgctggcccagcgccagcagcgactggcgggcgacggtcagcggtttgccgctgccgtcgttgaagccgaagctcatggttggcgcgatgggttggattttgcgcggcgttgggccatagccttgcgacaacaacaccagcgaaggccgaagctgctgcagcagttcgaggttcggttcggtgcgctggccgacgtcgaccaccgtcgccggcagctttggctccgccacccacaggttgtagttatgcacatcggccaccgccagcggcgtcacgcccaatgccaacagcagctcgatcggcaaccattccagcgccgcaacgcgcgcgatatccggcggcgcatccgccgctcggccgggcaacgaacccaacagcggcgacagcgccagcgccatcaacaaacggcggcgcagcggatcgtgagaagaagtgaatgtagaggacatcagtagacaaaactcaccggcgcgccgccgctcggatgcggcaacgtgcccataggaataccgtaaatttgctccagcaccggcccctgcatcagctccagcgggccgccctgggcgatcatttcaccgccgcgcagcgccaccaaatggtcgcagtagcgcgccgccatgttgatgtcgtgcagtacggcgatcaccgtaagatcgcgttcgcggctcaagcgctggatcagcgccagcacctcgacctggtgcgcgatatccagcgccgaggtcggttcgtcgagcagcaggcagcggctgtcctgcgccaccatcatcgccagccaggcgcgttggcgctcgccgccggacaggctgtccaccagccggttggcgaacggcttcaagcccaccagcgcgatggcctcttccacctgttgacgatcgttggcgccaaaacgccccagcgcgccatgccacggataacggccgacggccaccagctcgcgcaccgtcatgccttccgccgccggcaactgctgcggcaggtaggccacctggcgggcgaaggatttgctgtcccactgcgccaacggctgctgattgagcaagacctggccgccgctgggcgcatggtgccgcccgagcagtttcaacagggtggatttaccggaaccgttatggccgatcaggccgcagactttgccctggggaaaactgagcgacagcggttgcagcagcacccggccggggacggcgaaactggcgttatccagcgcgaaggtcgcgccgggattaagaagtttgtcctgcatagatcctgctttgtccggggcgacgcggtgccgccccggctatccggttagaaacggaaggttgcggtggcgaccacctggcgttctgcgccccagtagcaggcgtagtcgcggtagcagctcgacacgtaggtcttgtcgaacaggttgttgatgttgacgcccacggacgaacccggcaggccaaagcgcgccagatcgtatttaatggtcgcgtccaccagcgtgtagtccggcactttgaaggtggagttatcgctgttgaagctcgagctggagccgacgtaacgcacgccggaacccagcgtcagaccgctcaccgccgtttcgtggaaggtataatccgcccacagcgacgccatatgtttcggcacctcgacggtcggtttgccctgataggtattgtccttggtgtacttcgcatcggtataggtataggaggcgatcaggttgacgttggcattcaacgccgccttggcttccagctccacgccgcgcgaacggatctcgccgctctgcacgctgaactgcgcgttatccggatccggcgtcaggttgttgttcttggtcagctgatacagggcgccggtcaacacgattgggcgatccttcggcacgtatttcacaccggcttcatactgcttgccgatcgagggcttaaaggtctggccgttgattgacgtatcgagggtcggttcaaacgactcgctgtagctgaaatacggcgtcacgccgttgtcgaacaggtaattcaatccgccgcgccaggtaaactgcccatcggagcgttcgttggtgtacccgagaacgcggttattggccgacgttttcgcccagtcatagcgcccgcccagcgtcaacagccactggttccactccccttgctcctgcacatacaggccggtttgctcctgacggttcaaatacttgtatgggaagttgatgttgaccacatcattgccatactgcggctgggtcatgctcaggccgtctgcggaaccatagtcggaattgatatcgttgcgcatacgcgaataatctacgccaaacaacagcgtatggtcgatatcgccggttttcaccttcgcctgcgcctgagtatcaaccgcaaaattgttcaggtgctctttcgactgaacataagcgcgattgatcgtcgtcggtgatgacaagccaaatccgtagatgctcttcatatcggtgtccacctgcatataacgcaggttctggcgcaccgcccaggtatcgttgaaggcgtgttcgaaactgtacccaatcatccgctgcttgcgcgccatatagttgctggcttcgccttcgttgaaatcggtcggcagtttgctgccgtccggcaacgggatcagcgtgccctgcttcggcagccagccgtaataaccggtatagggatcgttttgaatgttggccagcagcgtgaagttggttttgtcatccgggcgccagctaaaggacggcgcgatcgcatagcgcttctctttgctcatgttttgctgcgtatcgctgtctttcgccaggccggtcaggcgataggaatagatgccctgatcgtccagcgcgtcgctgaaatcgaaaccggtctggaacaggttgtcgctgcccatcttgaactggatttcgcgcagcggctcggtggttggccgcttgctgaccatcgagaccaaaccgcccgggttgcttttgccgtacagcaccgagaccgggccgcgcagcagttcggcgcgttcgaggaaataaggatcgatggacgcttcgctgtagttgtcgcccagcaaccgcaggccatccagatactgggtggtgttggtggccgggaagccgcggattgccaccgcgtcataggtcgtggagctgccacggctggcgaatacgcccggcgcataggccagtgcgcccttcaccgtatccggctggcgcatatccatctcttcacgcgttaccacggaaacggactgcgggttcttctcgatcggcgtatcggttttggtgccggtggcgctgcgcttggcgacataggtgccgaccggcccccaggcgctttcctgctgggcggtgttgctaccgcccacaacggtaatcgtgtcttccttggcggccggcttggcgtcggcggaaaaagccggcatcgccagcgtgcccaacgccgcagcgacggtgatcgctaacgcgttgacggggagacggccctgcttggccgcggatgatgaaagacgcttggtcagcatgatttatttctctgatgaattattaaatgacgaatgtaaacgataataattattataagcgtcgcattttatgcagaagccaaattaaactgcaagccgaattcatagggcaaataggttaaggattaggcgcttagccttgcagttaacagggaaataaaacgagcggaaaaataaaaaagcccgcaaccaaggttacgggcttaataacaaagaaaaaactttcaccggggccgacgccccggtagcgattactggccgaacatatccttgatccagccggcgacgccatcgccatctttttgctcacccgccgccggttgttgctgttgctgcaccgccgcctggctggcctggcacaatccctgcggattgtcggtccagaccgggatggtgcgccaactgccgccgccgcagataaagttgccggcggagtcgatgctcatctggttaatgccttccggcggctgcagcatcagcggcagcggcgtctggttttccagatagcggcgatacagggtcaacgcgccgttggcgccggtcagcttggccgggccgttgttatcgcgcccgacccaggcgatcgccacttccttgccgtcgatgccggcgaaccagctgtcgcgtagatcgttagtggtaccggttttcgccgccaggttgtagttcgggaacttcaccgacagcgagcgggaggtcccgcgcgccacgccctgctgcatcgcgtacagcgtcaggtaagcggcctgcgccggcaccatgcgctccgcctgcgggaagctctggtacagcaccgtgccgtcttcggcgatcaccgaacgcaccgccgacagcggcgcacggttaccgccgctggcgatggtctggtactcctgcgccacttccatcggcgtcaggccgatcgcccccagcagcatcgaaggtaccgggttgatctccgctttcgggatgcccaggcgttgcagcgtggcgctgatctgatccagcccgaccgacaggccgaggttcactgtcggcacgttcagcgagttggccaacgcatccaccagcatcacctgaccgcggaatttgcgatcatagttgttcggctgccagacggcgccgttcggctgtttcagcgacagcggcgcatccgccagccaggtgttgaggcggtatttatccggttcggacagcgcggtcagatacgtcggcggcttggccaacgagccgaccagacggcgcgcctgcatggcgcggttgaaaccggcgaactgcgggttggcgccgccgaccatggcgcgcacttcaccgctgaagcgatcgacaatcaccatcgccgcttccagatcctgcaggtgacgcgcggcgcgcagcgccgggatgccgtcttcgaccgctttttccgccgcgtcttgcgacaccggatccagcgtggtgaagatcttcacgccggacaggtcattgaccttatcgcccagcctggtttgcagttcctgacgcaccatctgcataaacgccggctgtggcgtaatgacgccgcctttcggctgtacgcccagcggacgcgcgctcagcatgtcatacagctcgccgtcgatcacaccctggttctgcagcagtttgagcaccaggttgcggcgttccagcgccagtttcgggttacgccacgggttgtacagcgacgcgcccttgaccatgccgaccagcagcgcctgctgatcgaggctcagctcgtccaccgggcggccaaagtaatacaggctggccagcgggaagccgcggatctggtcgctgccgctctggccgagatacacctcgttcagatacagctccagaatgcgatccttgctgtaacggtaatcgaccaacagcgccatataggcttcgttggccttacgccacagcgaacgttcgttggtcaggaacaggttcttcaccagctgctgcgtcagggtactgccgccctgcaccgcgcggccggcggtcaggttggccagcaccgcgcggccgatggagtacgggctgatgccgtcatgctcatagaagtggcggtcttccgtggcgatcagcgtatccaccaacagatccgggaaaccggagcgcggcacgaacaggcgctgttcaccgttcggcgactgcagcatggtgataagacgcggatcgaggcggaagaagccgaagctgcggccgctgtccaggttttcgatcttcgccaggcggttgttctggaaatcgaggcgggcgcggatctgcccttctttaccatccgggaagtcgaacgggcggcgcagcatctcgatgctgttggcctgtacggtaaactcgcccggacgcgtcatgcggctgacctgacggtactgcatgccttccagcaggttgaccatctccttcttgctgtacggcatgcccggttccaggttgaccatgcggccgtacaccgccgccggcaattgccagactttgccgtcgatgcggctgcggatctgggaatccaaatagacgccgtagatcgccaacaggacggcgagcaccaggatcagtttgataatcaggccgagccagcggcgttttttacgcggcggagtcgcttttaccttacgcggcatgcgttcctcctcctcttcatactcatcatcgtcatactcgtcttcttcgtaatcgtcataatcgtcgtctcggcgacggcgcggcggcttgcgcgacgcggtgctttttggttgttttcctttgcgcccgatgggctcgcggtcatccccagccatggctgttgttctccgagcttgccgacactgccggccatgattagtcgcttaatctgtgccgacgccgcagcgctgaccagaagaaacatctgaattccaaaccttgaatgatcgcgacctactgatatttcttcgttcggcgcgtaggtaccgccgtggccggatcgtccggccacacgtgtttcgggtagcggcccttcatctctttttgcacctcgcggtaggcgccttgccagaaggccgccagatcgccggtgatttgcaacggccggtgcgccggtgagagtaactcaagcaccaccgggatgcgaccctcagccaacatcgggctgcgctgctcgccgaacatctcctgcaaacgcaccgccagcgccggcggtttgccggcctcataacggatcggcaggcggctgccggtcggcacagtgtaatgagtgggtagcgcattatccagccgctgcttttgctgccagtccagcaggcgggacaacgcctcggcgaggttgacctgcttcaagccgcgcagatcgcgcacgccgttcagcgacggcagcagccactgatccagcgccgccagcagcggctcttcatccatcgccggccactccgcctccggcagccaggcttgcgcgcactgcaggcgcacccgcaattgttcggctgcgccctcccagttgagcaccgccagcccctgcgcgcgcacccaatcgagcagcgcctgctgcagctcttcgtccgccggtttggccagcggctgagcgcgcagcgtcagacggccgatctgctggcgcttccaggcgcgcagcgtgcccttctcttcatcccattccaccgccgtgcgctgcatgaccatcgccggcagctgcgccgccagcgcttcgatgtccaccggcaacgccaacaggattcgcgcatcggggctgttgtggccctgcaacaggctggggacgatcagccagggcgcgcgcgacagcgcctcatcctggttcatcgccgcccccatgccgttagccagcaagtagcgaccgtcctgaccgcgacgctgggcaatgcgatcggcaaatgccgacgccaacaggcgcggtgccaactcgacgtcgacttgccccgcacgttgcggcaggcgtttggccaactgcgccgcgcgctgccgccagttcgcttgcgggcggctcagccaataaccgatatccatctgcccgccgcgcggcgattcttccagcaacgccgccaacaacaccgccgtcgccaggccgtcggcgctcagcgtcgcgccggcaaccagcatcgccgccagccgcggctcgcatcccaacgcggccatctggcgccccggcgcggtgagtttgtcgccgtcatccgtagcccccaaccggcgcaacaacgccctggccgccgccaatgccgccgccggcggcgcatcaagccaggtcagctgcgccggatcgtagcaaccccactgcaacagttcgagccagaagccggtgagatcgctctgtaaaatatccggttcggcatgttccgccgcgcgttccgcctgttctttggcgaacagatgccagcaaaggcccggctccaggcgcccggcgcgcccggcgcgctgtaccatcgaggcctgactgatgcgctgcgtcgccagccgcgtcaaaccgttgcgcacgtcgtaacgcgccacgcgctccagaccactgtccaccaccagccgaatgccctcgatcgtcaggctggtttcggcgatgttggtcgccagcaccaccttgcggcggccaggcgccgccggctgaatcgctttttgctgttgcgccagaggcaaggcaccatacagcgggcaaagatcggtatcgctcgccacctcgccggtcaatcgctccagcacccgattgatctccgccacgcccggcaggaacagcagcaaagatcccggctgttcggccagcaaccgcttcaccgccgccgctacgccgtcctccagccgctgatggctggccaacggctgatacaggcgttcaaccgggaaactgcgcccctcggacaccactaccggcgcttccggcagcaactgcgacaggcgagcgttatccaaggtggccgacatgatcagcagtttcagatcgtcgcgcagcccttgctgcacgtcgagcagcaacgccagcgccaaatcggcctgcaggctgcgttcatggaactcatcgaggatcaccaacgacacgccctgcagctcggcatcctgctgcagcatgcgggtgagaatgccttccgtcaccacttccagtcgggtttgcggcccgcttttgctttcggcgcgcatgcggtagcccacggtctgaccaggctcctcccccagttgctgcgccaggcgataggcgacgtttttcgccgccagccgccgcggctccaacatgataatgcgccccggcaacccggccttagccaggatctgcagcggcaaccaggtggatttaccggcgccggtcggggcgtgcaacagtacctgcggggcagactgcagcgcagccagcaactcatcgagcaccgcgctgacgggcaatgaagacactgaattctccgtagtggttagcgttaaacggcgtacagtgtagcattagctttgtccccgtagcctttcaaactgcggcgtcgttagctatagtacggagctcattcgtgcgccgcgccgctcgcggggccgctgccagtaacgtttaccgctgttcccgaccgttttgtcatgcatttgccgagtccttatgtccaattcgcgccgcctgtttttcgccctgtccttgcctgacgccctgcaacagcaggtgatccgctggcgcgccgaggcgtttgcgccgggggccggccggccggtggcggcggccaatttgcacctgacgctggcgtttctcggcgaggtcagcgcgcagaaagaactggcgctgcgcaaactggccggccgcatcgtgcaacccggcttcagcatgcggctcgacgatctcggccattggccgcgccccggcgtggtctggctcggcacccgccgcgcgccgcgcgggctgctgcagctggccgagctgctgcgttcgcaggccgcccgcaacggctgccatcaaagcgcgctgccgttccatccgcacatcacgctgctgcgcgccgccactcagccggtggcgctcccgccggcgacgccgggctgggcgttcagcgccgacgccttttccttatatgagtcggtgttcgaaaacggccgcacccgctatcaacacctcgaacagtggccgctggccaaacaggcatccgcatgattttctctccaccgctgcgttccgctacgctgatcaaacgttacaaacgctttctggcggacgtgatcaccccggaaggggaaacctttacgctgcactgcgccaataccggcgccatgaccggctgcgccacgcccggcgacaccgtttggtactccacctcggacaatcccaagcgcaaatacgcccacagttgggagttgacccatacccaacaggggcactggatctgcgtcaataccctgcgcgccaacgcgctggtgcgcgaggcgattgaacataatttaatcaatgaattatccggttacagtaaaatcagcggcgaggtgaaatacggcggtgaaaacagccgtatcgatttgttattacaggcagaaaatcgggttaactgctatattgaagttaagtcagtcacattactgcaacaacaacgtggttactttcctgatgcggtaacgctcagagggcaaaagcacctgcgtgagttgctcagcgtggttgaaagcgggcaacgggcggtgttgttctttgccgtgttacacagcggtattgagcaggtcgcaccggcacatcatatagatgagcgctatgcggcgctgttggcacaggtccggcagttgggagtggaagtggtttgctacggggcaaagttatcacctgacggtatttatctctgcgataagctgccgttttttatcgattagcgcagtcgggtccctataaatagacaaccggccagcacgatcgccaaatacgccctccttcacacgattgtcaagcgggcgacaggaataattgccaacctaccttccttctgttatttatagcggcctgtttttcccccgcattggggattcgatagtgcgtgtgtatgtaggagaagcaacatgcaagaagggcaaaaccgtaaaacctcgtccttgagcattctcgccatcgctggggtggagccgtaccaagagaagccgggcgaagagtacatgaacgacgcccagttgtcgcatttcaagcgcattcttgaagcgtggcgcaaccagctcagggacgaagtggaccgtactgtatcgcatatgcaagaagaggcagccaacttccctgatccggccgaccgtgccactcaggaagaagagttcagccttgaactgcgtaaccgtgaccgtgaacgcaaactgatcaaaaagatcgagaaaacgctgaagaaagtggaagacgatgatttcggctactgcgaatcttgtggcgtggagatcggtattcgtcgcctcgaagcgcgtccgaccgccgatctgtgcatcgactgcaagacgctggctgagatccgcgaaaagcagatggccggctaataccgctactctacatgattggagctgcatcaaggcggcaagaatgcgcatcccgatgagcttactcaagtaagtgattcgggtaagcaggcgcagctaacacagatgcagtttcaagcataacgagtatgttatcgctgcggcgtgcgcacccgcgtgcgccgcacagagaaaagggaacctctcccctctgatatgcaagaaagtcattatgtggggcgctttgccccatcgccttccggggatctgcatttcggttcgctgattgccgctctgggaagctaccttcaggctcgcgcccaacgcgggcagtggctggttcgcatcgaagatatcgacccgccgcgcgaagtccccggcgccgccgctcgcatcctgtccgcgctggaacattatggtctccactgggacggccaggtcatctatcaatcccaacgtcacgacgcctatcgtgccgcgctggatctgttgcagcgccaggggctcagctattactgcacctgcacccgcagccgcatccagcacatcggcggattgtacgacggccactgccgcgatttgcagctcggcccgcagggtgccgctatccgcttgcgtcagaccgcccccgtttaccggttcaacgatctcctgcagggagaattgcacgccgatccggcgctggcgggggaagactttatcattcgccgccgcgatgggctgttcgcctacaacctggcggtggtgatcgacgaccattttcagggcgtgaccgagattgtccgcggcgccgatctgatcgaaccgacggtgcgccaaattgccctctaccgccagctgcaggcgccggtgcccgcctatgtgcatctgccgctggctctgggcgccaacggcatcaagctgtcgaagcaaaatcatgcgccggcgttgcccgccggcgatccgcgcccggtgctgatcgccgcgctgaaatttctgcgccaaccgctgccggaaagctggcaagatcttgacctgccattattattgagctgggcgatcgaacactggcggttggaaaacgtgccgcgtcaggaggctatccctctggatgaaaacacgccggcattctcaaaggagccatggtgagctatgattagccgctattttttgttagctccatttttatcagtcactatcgaggtgtaccatttttacccgagtagccaacttctgtcgtaaggtactgacccgcgatgacaagctgccccgcgacgacgcggcggccggcgataaaaacgtagtccgcgaagagcgtgccgcggcgccaagccgccctgcgccgcagccgcgcgccgccgataacggcagcaacgcccctgcccgccgctcaacgccgcgcaagcgtccgccttttcctatcgccgagagcaacgactcgatgaccgtgatcccgcgcgaacagcactcgatctcccgtaaagacatcagcgagaatgcgctgaaagtgctttatcgcctgaacaagtccggctacgaggcttatctggtcggcggcggggtgcgcgatctgttgctcggcaaaaagccgaaagacttcgacatcaccaccaacgccacgccggagcaagtgcgcaagctgttccgcaactgccgcctggtcggccgccgtttccgcctggcgcacgtgatgttcgggccggagatcatcgaagtggccaccttccgcggtcaccacgaacagaatcaggaatccgacaagaattcctcccagcaggcgcaaaacggcatgctgctgcgcgacaatatcttcggttcgatcgaggaagacgcccagcgccgtgatttcaccatcaacagcctgtactacggcgtggcggatttcaccctgcgcgattacgtcggcggcctgaacgatctgaagcaaggcgtgatccgcctgatcggcgatccggaaacccgctaccgcgaagatccggtgcgtatgctgcgcgcggtgcgcttcgccgccaagctggacatgcgcatcagcgaagagaccgccgagccgatcccgcgcctggcctcgctgctgcatgagatcccgccggcgcgtctgttcgaagaatccctcaagctgctgcaggcgggttacggtttccagacctacctgaagctgtgcgaataccagctgttccaaccgctgttcccgctgatcgcccgtaacttcacgccgaaccacgatacgccgatggagcgcattctggtgcaggtgctgaagaacaccgatcaccgtctgcagaacgacatgcgcgtcaacccggcgttcctgttcgccgccatgctgtggtacccgctgctggagcacgcgcagaagctggcgcaggaaagcggcctggcctactacgacgccttcgcgctggcaatgaacgacgtgctagacgagcagtgccgctcgctggccatcccgaaacgcatcaccacgctggtgcgcgatatctggcagctgcagctgcgcctgtcccgccgccagggcaaacgcgcgcacaaactgatggaacatccgaaattccgcgccgcctatgatttgctggcgctgcgtgcggaagtggaagacaatcaggaaatgctgcgtctggccgagtggtggggcgagttccaggacgccacgccggcgcggcagaaagccatgctgagcaccctgggtgacgatccggcgccgcgccgcgcgcgccaacgccgccctcgccgccgggcaccgcgtaaagaaggggcataatgatccgcgtttatatcgcgctgggcagcaacctggcgcagccgctgcaacaggttaacgccgcgctggaggcgctggagcatctcccgcgcacccggctggtcacctgttcttcgttttaccgcaccaagccgctggggccgcaaaaccagccggactttctcaatgcggtggtggcgctggataccctgttgccgcccgaacagctgctcgaccatacccaggcgatagaacgcaatcaggggcgcgtgcgcaaggatgaacgctgggggccgcgcacgctcgatctggacatcatgctgtacggcgaccaggtgatccataccgatcgcctgacggtgccgcattacggcctgaaagagcgcgaattcatgctctacccgctggcggaaatcgcccccgatctgattttccccgatggcgaaccgctcgccagctgcctcaagcgcgtgccggaaaacggcatggcgctgtggcactcgccaaaaccgaaatcctgacccgcctacagcgccaaccgcgcgacaaatccccccgccgggcgattggcgaaactgatctgtaaaccatgcaagccggcaatacgctgtacgatcgagagccccagcccgctgccggtctgttcctgccccggcgggcgatagaagcgctctccgagccgcgccagatgctccgtggtgacacccggaccgtcgtcctccaccgtcagcgaacgttcgctcaacgtcacggtgacgacgccgccctgcggggtatatcgcaccgcgttgtccagcagattgcgcaacagcaacgacagcagcaaggtttctccctgacgcggcggcggcgttccccgatgttcatagcgtagcgtcacgcccgccgcatgcgcctgccggtcctgttccgccaaggtcatcgtcaccagattgttccagtcgatcggcgccagttcggccagatccgacagcgaatccagccgcgacagcgtcaacagctgatccaccagccgggtggcgcgatcgatgccgagcgtcagattgtccagcgcgtgctcgcgcatcggcgcatcgtcccccgccagctgcaccacttcggtctgcacccgcagcgccgccagcgggctgcgcaactcgtgcgcggcatcggaggtgaagcgccgctcccgtaccagcaaagcgttgatgcgggcaaacagcgcattgagcgcatccaccagcgggcgcacctcggtcggcacctggcgcgcgtccaacggcgtcgcatcatcgggcgcgcgccggcgcaaaccggccgccaccgcgcgcagcggccgcagctcgcgcccgaccatcagcgcgatcagcagcatcagcaccggcagcgtcgccagccagggcaccagttggccggtcaccatgcccagcgccatatcgcgccggtaatcccactcctggccgaccacgatgcggtagcgcccgtccgggctggtcagccacaccaggcgccagctgtcgtcatcgcctttgcgctcgccgtcggtaaaaccctcacgctccccgtcaaacaggaagtcggcaccgttctcgccgtcgttgagcagcatcttgccctggcgatcgaagatggcgaacgccagcgcgtcgtcgtcctgttcgccgcgcttgccgtgatgcaccagcttcttggttttcggcaggctgcgcgcgctttcatcggccaacagatcgccgaggttggcggtcgccagccgtttggcgaacagcatctgctgggtgtcgaacacttcgttgatggtgttgcgcgacatcacccaggccaccacgctggcggtgctccaggtcagcagcgccaacaggctgaaaatcaggatcaggcgcagccgcaggctgagacgcttcacggcgcatcccccagcgtgtaacccacgccgtggatggtacggatgaaaccgttgcccagcttgcgccgcaggtggtgaatatgcacctccaccgcgttgctgctcacttcgtcgtcccagttgtacagtttctcctgaatcaacggccgcgccagcacgcgccctttgttgtgcagaaacagctccagcaccgccaattcgcgcggcgtcagcgtcaccggctcgccgttgcagctcacgctgcgggtggcgctgtcgaacaccacgttgccgtgcgtcagctgcggcatcagttggccgtggcgacggcggatcagcgcctgcaggcgcgccgccacttcggccagcgcgaacggcttgcacagataatcgtcggcgccgctttgcagcccgctgacccgctgctccagcgcatcgcgggcggtgaggatcaataccggcacgtcctgcccggcctggcgccactcgcgcagcagatccaggccgtcgaggcccggcaggctgagatcgaggatcaccgcgtcgtacggcgcgctgtccagcgcatttttgccgacggcgccgtcggtgaaccagtccagattgaagccgagtttggtcagcccggccttgatgccgtccccgatcagtttgtcatcttcgatcaacagaattcgcatgagtatcccttttgagtcttggcgccattgcaccacaaggttcttaagaaccgcttaagcatggcgatccgcgctacccaccccgatcgggttacagtagaatgactgcacttttttgcagcctgggcctgcgtacgccgcacggcccgtttcaggagacgttgtgatgaaacccaccaccgtgacccacttgcgccagtggaaacaggagcaacgcaagtttgctacccttaccgcctacgatgccagctttgccaaactgtttgaagagcaaggcatcaaagtcctgttggtgggcgattcgctgggcatgacgctgcagggccacgactccacgctgccggtcaccgtcgccgacgtggcctatcacacgcgcgccgtgcgccgcggcgcgccggcctgtctgctgctggccgatctgccgttcatgagttacgccacccccgaacaaaccttcgccaacgccgccgagctgatgcgcgccggcgccaacatggtgaaactggaaggcggcagctggttgtgcgacacggtgaaaatgctcgccgagcgcgcggtgccggtatgcggccacctgggcctgacgccgcagtcggtcaacgtgttcggcggctataaggtacaagggcgcgacgaactggccgccaaacagctgttgcaggacgcgcagaatctggagctggccggcattcagctgctggtgctggagtgcgtgccgaccgagttggcgcgccagatcaccgaagcgctgtccattccggtcatcggcatcggcgccggcaacggcaccgacggccagatcctggtgatgcacgacgccttcggcatcaccggcggccacacgccgaagttcgccaagaacttcctggcgcagagcggcgatatccgcacggcggtgcagcactacattcaggaagtggagcaaggcctctacccggcggctgaacactcttttaactaagcgatggttccaggagtcacccaatgattattatcgaaaccctgccgatgctgcgtcagcagatccgccgctggcgccaggaaggcaaacgcatcgcgctggtgccgaccatgggcaacctgcacgacggccacatgacgctggtcgatgaagcgcgcgcccgcgccgacgtggtggtggtgagcatcttcgttaacccgatgcagttcgatcgcccggacgatctggcgcgctacccgcgcacgctgcaggaagacagcgaaaagctgacccgccgcggcgtcgatctggtgttcgcgccggccccggccgcggtttatccgcagggcctggagcagcagacctacgtcgacgtgccgggcatctccacaatcctggaaggcgccagccggccgggccacttccgcggcgtttccaccatcgtcagcaagctgttcaacctggtgcagcctgatttggcctgtttcggcgagaaggattaccaacagctggcgttgatccgcaaaatggtggcggacatgggttacgacatcgatatcgtcggcgtgccgaccgtgcgcgccaaagacggcctggccctcagctcgcgcaacggctacctgaccgccgaagagcgcaaggtagcgccgcagctgagcaagatcatgaacgcgctggcgcaacagctggccaatggcgagcgccagatcgaagcgctgctggagcagaccgccgagcagctgcgcgccgccggctttacgccggatgagctgtttattcgcgacgccgacagcctgcagccgctgacggtggacagccagcgagcggtggtgctgatggcagcctggctgggcaaggcgcgtcttatcgacaaccagcaggtcgacctgacgctgtaagccgttttttatactgtcgtcaccctaccgccctgaccataggtagacaatggcggggcaatcggtgacgatagagattgcagggatgcaggagagatgttcaacccccagcgcctgtgaaggccgatattcagttaggtaaagctatgatacgtactatgctgcaaggcaagctgcatcgcgtcaaagtcactcaggctgacttgcactatgaaggctcctgcgccatcgaccaggatttcctggaggccgccggcattctggaatatgaagcgatcgatatttacaacgtggataacggccagcgcttctccacctacgccatcgccgccgagcgcggttcgcgcatcatttcggtcaacggcgccgccgcgcgctgcgcctgcgtcggcgacaaactgatcatctgctcctatgtgcaaatgaccgacgccgacgcccgccaacaccacccgaaagtcgcctatttcgaaggtgacaacaacctgcagcgcaaggcgaaagccgtgccggttcaggtcgcctgacaataaaacgggcgccttgcgcgcccgttcttccttattgcaccaccaccgtgcccggcttgttggctatccgatccgccatggtctggatcgagtcggtgcgcagaatatacagccgctttagcgtataggggttatcccccggctttaccttgccctgcaccgtggtcaccgccagatggaaaccggcgtcctgcgccgcctgaatcgcccgttggttatagccgccgaacgggtaagacagatacagcacgtgcggattgaactgcgacagcgcgcggcgtgagcgctcaaaatcaaactcgatattgtgcagtgaacggctcagcaaaatcggctggcgattaccgtcggtgcggtgcaggaaatgggtatgcgactgcacgtcgaacacgtcctgaatctgcttgagctccgagacgctcataaactgcagcgagtccgggttccatttctgcggatggcgtttgatgcgcgaagagatgatgaacgccgtggcgcggaaaccgtaatccttcaataccgggtaagcgtagcgatacaccgatttcagcccgtcgtcgaaggtcagcacgaccgccttgcccggcaggttgatctgatttttcaggtaggcttccagctggtacagcgaaatggtgtcgtagcccgcctgcttcaggtaggtcatctggttgctgaacgccacgtctgaagtggtggtcgaggtgtggcggaagcgtttgttctcttcgtttttcagcaggtggtggtaagtcagcaccggtatgccgttatcgatctcgcagtccaactcattaatgaaccccagccgctcgccgatgttgacctcgtaccaggtgttgttcaggcgatccttcagcttgccgatgatcggatagcgcaggttgccttccagcgtgcccaatacctcgctgtccttgtccgctgcggtgtatacgtcgatcgttttttgcgtgatcagattctggttggtcagcggtttgttcagctcgcccagatcgtcttgcaccttgcgcgacttcttcaattcacgcacgtcgtctttatcgataaagccggtaccgtgcccgaatttgaattcgtagtattccgcatccgccgggaagacttggagcagttgcccgcgcttcacttcccctaccgggatcacatgctcgcccaccaacgcatagacttcgctatcgcgctgcgcttccatgtattcagatttaaccgcgctgtcttccgacagcagactagccaggctcacaggggaaaccaacgacatcagaatgccgagcaacccagccgttaacgtgtattgagaccgcatgatgatgttctgcttacgagtgcgtaatgacaaaagtggaggaaatgtggagcgccagcatagcacgatttgaacagcggggaactagcggttatttgagcaattctattgatttacgcgccgcctgcgccaaatcaagaaaagcgcccccgccgggaaagcgagggcgcgatacgatcagctgcgcaggccgcggccgcgctcgatcaggtaccaggacagcaggtaaaacaccgcgataaacgccaccaacaccgccatggtgaacgccagcggcacgtcgttgatgccgaggaaaccgtagcggaagccgctgatcatataaacgatggggttcagcttggacaccgcctgccagaatggtggcagcagcgacagcgagtagaacaccccgcccaggtaagtcagcggcgtcagcacgaaggtcgggatcaggctgatgtcgtcgaaagtggtggcgaacaccgcattgatcagccccgccagcgagaacaggatcgccgtcagcagcagcgtcagcgcaatcacccaccaggcgtgcacctgcagcggcacgaagaacagtgagatgatggtcaccagtacgccgacgcagatgccgcgcgccacgccgccgccgacatagccggcgatcaccacgtgggtcggcaccggcgccaccagcagttcctcaatgttgcgctgaaacttggcgctgaagaacgacgaggcgacgttggcataggagttggtgatcaccgccatcatgataaggccgggcacgatgaactgcatgtagctgaagccgtgcatatcgccaatgcgcgagccgatcaggttaccgaagatgatgaagtacagcgtcatggtgatcaccggcggcaccagggtctggatccagatgcgcgcgaaccggtttacctctttggcccagatgctctgtaaggccacccaatacaaacgcgtcatgctttctctccattgccgttaaccagggtgacaaacagctcttccaggcggttcgccttattgcgcatgctcagcacctgcacgccctgcgcgctcagctgggcgaacaggccgttcagcccctgctcgcgcatcacctccacttccagcgtcgaggtatccgtcaggcggctgtggtaaccgtccagcttcggcagcgggctcttcgccgccagatcgaggatgaaggtttccgacttcagcttggccagcagccccttcatcgaggtgttttccaccagttccccgttctggatgatgccgatgttgcggcacagcatttccgcctcttccagatagtgggtggtgaggataatggtggtgccctgggcgttcagctctttcaggaagccccacatcgagcgacgcagctcaatatccaccccggcggtcggctcatcgagaatcagcagcttcggctgatgcatcagcgcgcgggcgatcatcaggcggcgcttcatgccgccggacagcatgcgggcgcgctcgttgcgcttgccccacagatccagctgattgaggtatttttcggcgcgcgccatcgcttcacgccgcgtgacgccgtagtaacccgcctgattcaccacgatctgcaacacggtctcaaacggattgaagttgaactcctgcggcaccaggccgagctggcgcttggcgttgacgatgtctttatcgatgtcgtaaccgaatacccgtacgctgccggccgttttgttcaccagcgagctgatgatgccgatggtggtggactttccggcgccgtttggccccagcagggcataaaagtcccccgcttcgacgctcaggtcgatgccgcgcagcgccttgacgccaccggcgtaagtcttggtcagctgcgctaattccagtgcataattcatatgtaaaatagtaccttataacgatgagtatgccgccgcgcccctgtttgcgaggcttgaaacactaacaataatcctagcatcgacggcgttttcactgcgtcgaatccgtgcggtaaatgaggctgcaccactgttccgatttccaaattgtgacgcttaccctatattaccccaacgcaatctgtccgttacgggtcaatcaccttcatgaaagaaatcgaagagcttatcgccaacaaccaggcctggtcggccaatatcagtcaggaagacccggatttttttgaacgtttagcccaggcgcaaaagccccgcttcttatggattggttgctctgacagccgcgttcccgcagaacgcctgaccggcctcgagccgggtgaactgttcgtccatcgcaacgtggcgaacctcgttatccacaccgatcttaactgcctgtcggtggtgcagtatgcggtagatgtgctggaggtcgaacacatcatcatctgcggccacctgggctgcggtggcgtgcaggccgcggtggaaaacccggagctggggctgatcgacaactggctgctgcacattcgcgatctgtggtacaagcacagttcgctgctgggcgagctgccgccggaacagcgtttcgacatgctgtgcgagatcaacgtcattgaacaggtgtacaacctgggccattccaccatcatgcaatcggcctggaagcgcggccagaaggtgatgatccacggttgggtgtacggcattcaggacggccgcctgcgcgatatggaagtgctggcgaccagccgcgagagcctggagatgggctaccgcaaagcgatagccaaactgaagcaggataaaggcgtataaccccgccgcgggcgcggcttgccgcgccccacatccaattactcgtccagcagcaccactttgccgacgtacggcaggtgacggtagcgctgggcgtagtcgatgccataccccaccacgaactcatccgggatcgagaagccgacgtattcgaccggcacctgcacttcacggcgctcaggcttgtccagcaaggtgcaaatcgccagcgacttcggcccacgcagcgccaaaatctcgcgcactttgttcagcgtattgccagaatcgatgatgtcttccacgatcagcacgtctttgccgcgaatgtcttcgtccagatccttgaggatcttcacgtcgcgagtggtggacatgccgctgccgtagctggaagccgtcatgaagtcgacttcgtgcggcacgtcaatcgcgcggcacagatcggccatgaacatgaaggagccgcgcagcagcccgaccagcaccatgtcactgccgctgtcgcggtaatgttcggtgatctggcggccaagttcggcgatacgggtcttaacttcctgctcggaaatcattacgtctacagtgtgtttcatagtattcaggtcagttgccggaagaaaggtgcggagtttagcatagcctttcgccggtggcgacgcgagcgcgccgccacatgagcgccgggccgcgatcattcgtcgacggtaaagcccatcatcatgccggtatcttcgtgttccaacaggtggcagtgggccatatacgcatgttcgctgcttgccggatgatcgaagcgcaccagcacttcgctgcgccacccttcgacgcgcaccgtgtccttccagccgctgcgatgcgccgccggcggtttgccgttttccgacaagatacggaactgggtgccgtgaatgtggaacgggtgcaacatcatgtcgccctcgccggaaatggtccatttctcatactggccccgtttggcggcgaacatcggcttggtcatgtcgaaggccttgccgttgatcatgttgccgtggctgaagtcgaacggtttggctttgccctgcgcgccgccgtgatccatcccggccatcttgccatgatccatgcctttcatgttgccgtgatccatgccctgcatgccgcccttttccatgcctttcatgttaccgtggtccatgcctttcatgtcgccaccgcccatcgcgccatgattcatgctcatgccggccatcgcctggtggccataacgatccatcagcgcctgcatgccgagcatatccagctgcggatccatcatcagctgcagccaacgctcctggatgccggcggtggcaggcaatgtcggcagcttcaccaggctgtccggcatggctttaatgccctgcgccaacgacggctgaatgcgcaacaccggcagcggccgatcgaacggcgccagcgtcatgcccatctgtttcaccggcaacgtcacgatatcgaatgctttcccgtcggaggcatcgaccagtacttcaaaacgctcgcccatcagcatcggcagctcggtcagcttcaccggctccgccaggaaaccgccgtcgctggcgatgacgtacagcggacggttgtcactggccgccagattcagcgagcgggcgttacaaccgttgaggaaacgcagacgcagccagccgcgcggcgccagatgttgaggatactgcgcgccgttggtgaacatgcgatcgccaaaccagcccaccgccgcgctcatcacgtccaggcggtattcgatctgcgcgtctttgcccagccgcttatcctgcaggatcaccggaatatcatcctgcccccaggttttcggcagcggcagtttggcgctttcgtcgtcttccagcagcaccagccccgccagccccatcatcacctggctgccggttttaccgtgtgtatgcgggtggaaccagcaggtggccgccggttgatcaacggtgaaattcaccgtgcgcgtcgcgccgggatggatcagcgcctgcgggccgccatcgacgtcgccgggaatttccaggccgtgccagtggacggtactggcctccgccaggcggtttttgatatcgaccgtcaccggttggccacgctgcagcttcaccgccggcccgagcagcgcgccgttgaatccccaggttttggtcgcggcgccgggcaaccagcgggtttcccccgcctgcagcgccagcgcaatctttccctgcgcgtccggcatcaacagcggcggtaccggcagggccggcctatcggccgcccaggcggctcggctccataacggcaatgcgctcgccgcgcccagcgcggcggttaatttaataaaatcacggcgtaacatcgctgactcccttttctcagtgacataactcaatgccgccagcctaaaccttccccctggcggaaggtcaagcctttcctggcggtattttaagctatgcctcacaatcaagagagtgtgactggcaagcgcgacgccggcccgccggcaataaaatttggtgcctttacagacaagtgtggtaacgtcagcagacgacaaacaggcctatttcatgatgaaaaaaacaacgttatcgatgctgttgctggcgatgctgggcttctccaacgccagtctggcgctgaatgaatccgaggcggaagatctggccgatcttacggcggtatttatttatttgaaaaatgattgcggctacaacgatttgccaaacgcgcaaatcaaacgcgccattgtctatttcgcgcaacaaaaccgctgggatttgagcaactacaacagtttcaatatgaaggcgctgggcgaagacagctatcgcgatctcagcggcatcgccattccaacgcccaagaagtgcaaatcgctggcgcgtgactcgttgagcctgctggcctacgccaattaattctttccccttctcccatccgcttaacgctctctctgtctgaaattcaaccgtgcatcgccaggcagagttagctatgatgttgcgccgatttttcatggctgttattacggagtttcccgcacatgacccagaaagaaatttggtacgaaacgctgcatacgggcttcggccagtacttctcggtagagaaggtgctgtaccgcgagaagaccgatcatcaggatctggtgatcttcgagaacccggagctggggcgcgtgatggcgctcgacggcgtggtgcaaaccaccgagcgtgacgagttcatctatcacgaaatgctgacccacgtgccgttgctggcgcacggccgggcgaagaaagtgctgattatcggcggcggcgacggcggtatgctgcgtgaagtcagccggcaccctggcgtggagcagatcaccatggtcgagatcgacgccggcgtcgtcgagttctgccgccaatacctgcccaaccacagcgccggcgcctatgacgatccgcgcttcaagctggtgatcgacgacggcgtcaacttcgtgaatcaaaccgacgaaacgttcgatgtgatcatctccgactgcaccgatccgatcggccccggcgaaagcctgttcacctcggcgttttatgaaggctgcgcccgctgcctgaatgagggcggcattttcgtcgcgcagaacggcgtctgttttctgcagcaggacgaggcggtcaacagccacgccaaactgagccactactttagcgacgtcagcttctatcaggcggcgatcccgacctattacggcggcatcatgaccttcgcctgggcgagccaggacccggcgctgcgccagcgcgatctgcctgccctgcaacagcgctttaaccaaagcggcctacactgccgttattacaacccggcaattcacgtcggcagctttgccctgccgcaatatttgctcaatgccctgaacgtaacacgttaagcgagaagataaaggaggtggcccaaattgcataagctaaaactgcacggcttcaacaacctgaccaagagcctgagtttttgtatttacgatatttgttacgccaaaaccgcggacgatcgcgatggctatatcgcctacatagacgaacaatataacgccaaccggttaaccgagatcctgagcgaaacctgctcgatcatcggcgccaatattctgaacatcgcgcgtcaggactacgagccgcagggcgccagcgtcaccatcctggtcagcgaagagccgatcgatccgaaagacgtcgatacgtcggaacaccccggtccgctgccgaatacggtcgtcgcgcacctggacaaaagccatatctgcgtacacacctacccggaaagccatccggaaggcgggctgtgcaccttccgcgccgatatcgaggtttcgacctgcggcgtcatttcgcccctcaaggcgctgaactatttaattcaccagctggaatccgacatcgtcaccatggactatcgcgtgcgtggttttacccgcgacgtgaacggcgtgaaacattacatcgatcatgagatcaattcgatccagaactttatgtcggaagacatcaaggcgctgtaccacatgatggacgtgaacgtttaccaggaaaatatcttccataccaagatgttgctgaaggatttcgatctgaagcactacctgtttaacgcggagccggaggcgttgagcgccgccgagcgcaagcagatcaccgatctgttatggaaagagatgcaggaaatctattacggccgcaatattccgcatctgtgatggaaagggcgcggcacgccgcgccctgatgcttagtacttcagcatgaaagaacgataggctttcaacaccagcaggaaatcctcaacgccgcagaatgagaggctttcttcgtcgtaatagttcatcccctcttccatttcatcgccctcgaactccagctgattggcgcggatcatcacttcttcaccgtccatcagcagcgtatattcatggccttccagctgccattgacgctcgctgcctttgacctcggccgcaccggcttcaatgcggtccagcaggttgaaatcgcctttgacttcttcgttgatccagtggccaatcgcttcatgccccatcgaaaatctgacgatcacctgaccggtgacgtcacgcagaaattcgtaatccatagcatgccctcctgagccctttttcttagtgtaaacataaatggcggactaactcagtgagcgctcgcaaagttggcaactgagtaaaataaaacgggaggccaaggcctcccgttaaacagttgcgcaatatagcggcttacacggcggtttggaagatcacgccgtcggctttttcggtgtactgccccagctggtcaaagttcaggtagcggtaggtatccgccgccgtcttgtcgacctgcgccatataggtctggtactcgtccggcgtcggcaggcggcccagcagggacgctaccgcggccagttcggcagacgccagatagacgttggcgccggtgcccaaacggttcgggaagttacgggttgaggtggaaaccaccgtcgcgccgtccgccacgcgcgcctggttgcccatgcacagcgagcagcccgggatctcgatacgcgcgccgctcttgccgaagacgctgtagtagccttcttcggtcagctgagccgcatccatcttggttggcggcgccacccacagacgggtcggcaactggcccttgtgctgatccagcagcttgcccgccgcgcggaagtggccgatgttggtcatgcaagaaccgatgaacacttcatcgatcttgctgttggccacgtcggacagcaggcgcgcgtcgtcaggatcgttcggcgcgcacaggatcggctctttgatctcgttcagatcgatgtcgatcaccgccgcgtattccgcatccgcatcgccttccagcagttgcggatccgccagccatttttccatgccctgaatacggcgctccagcgtacggcgatcgccgtagccttcggagatcatccacttcagcagcacgatgttggagttcaggtactcttcgatcggcgccttgtccagcttgatggtacaaccggcggcggaacgttcggcggacgcatcggtcagctcaaacgcctgctcgaccttcagatccggcaggccttcgatctccagaatacggccggagaagatgtttttcttgcccttcttctcgacggtcagcagaccttgctggatcgcgtagtaagggatggcgtgcaccaaatcgcgcagggtgatgcccggctgcattttgcctttgaagcgcaccagcaccgactcaggcatatccagcggcatcacgccggtcgcggcggcaaacgccaccaggccagaaccggccgggaaggagatgccgatcgggaagcgggtgtgggaatcgccgccggtgccgacggtgtcaggcagcagcatacggttcagccaggagtggatcacgccgtcgcccgggcgcagcgagacgccgccgcggttcatgatgaaatcaggcagcgtgtggtgcgtggtcacgtcgaccggtttcgggtacgcagcggtgtggcagaacgactgcatgaccagatcggcggagaagccgaggcaggccaggtctttcagctcatcgcgggtcatcgggccggtggtgtcctgagagccgacggaggtcatcttcggttcgcagtattcgccagggcgaatgccggcgacgccgcaggcgcggccgaccattttctgcgccagcgagaagcctttgctgctggcggctaccggtttggcgatgcggaacacgtcgctgtgcggcagacccagcgcttcgcgcgccttggtggtcaggccgcggccgatgatcagcgggatacggccgccggcgcgcacttcatccagcagcacgtcggttttcagctcgaagttggcaatcagcgcgccggtctcgtggttgcgcacttcacctttgtacgggtaaacgtcgatcacgtcgcccatgttcagctcggacacgtccacttcgatcggcaaggcgccggcatcttccatggtgttgaagaagataggcgcaatcttgccgcccagcaccacgccgccaccgcgcttgttcggcacgtgcgggatgtcgtcgcccatgaaccacagcaccgagttggtggcggatttacgggaggaaccggtgccgaccacgtcgccgacgtaggccagcgggaagcctttcttgttcagcagctcgatctgtttgatcgggccgacgctgccaggctgatccggcacgatgccttcacgttcgtttttcagcatcgccagcgcgtgcagcgggatgtccgggcgcgaccaggcgtccggcgccggagaaaggtcgtcggtgttggtttcgccggtgactttgaacacggtgacggtgatcttttccgccagctccgggcgcgacaggtaccattcggcatcggcccaggactgcatgatctgtttggcgtgcgggttaccggccttggccttctcttccacgtcgtagaagttgtcgaacatcagcagcgtgtgggacagcgctttggcggcgatcggcgccagcttttcgttgtccagcgcttcgatcagcggatgaatgttatagccaccctgcatggtgcctaacagttcaatggctttctcgggggtaaccaggggggatgtcgcttcacctttggcgatggccgccaggaaacctgctttgacgtaggcggcttcgtcgacgcctggtggaacacggttaatcagcaggtctaacaggaattcttcttcgccttttggcggattcttcagtagttcgaccagcgcggccatttgggtggcgtctagcggcttaggggcgatgccctcagcagcacgctcggctacgtgcttacggtattcttctagcacgacgttctcctcgctctcattgtcatttattgtgcctggcgtatatgcaaaccgggtttataccctttgggtttcactctgtggctaggcgatcggcccgtaaaggccccgaaacggtgattggggcaaacaagcacggtcaaacagcgttacagcatgaaagactgatgggtagagcgcacggcgatattgatgccatctatcctgacggggcactgctgtcgatgtcctggactgtaaggtacagtgcccggttccgctcagccagcatatcaggatttgaaacggttgttaattcgttcacataaaagcaacattaaatctttgctgaatcgttgagcgcagcgtaatcggctgccggactagcagggcattatatccacataattaaaatggatataagcatgaggatcggaatttggcgtcgcggccacaaaaaaccgcgttctgcatctgagcaaaaaaaaaacggccccttctcaggagccgcttgatgaccggtcaaaccagcagaattacttcttcttggctttcgggttaggcagatcggtgatgctgccttcgtagatttccgccgccagacccacggattcgtgcagggtcgggtgagcgtggatggtcagcgcgatgtcttctgcgtcgcagcccatctcgatagccagaccgatttcacccagcagctcgccgccgttggtgccgacaatcgcgccaccgatgatgcggtgagtttctttgtcgaagatcagtttggtcatgccgtctgcacagtcggaagcgatcgcacggccggaagccgcccacgggaaggtggaggtttcgtagctgatgcctttctctttcgcttctttctcggtcagacccacccacgccacttccggctcggtgtaagcgatggatgggatcactttcggatcgaagtagtgcttcatgccggcgataacttctgcggcgacgtggccttcgtgcacgcctttgtgcgccagcatcggctggccgacgatgtcgccgatagcgaagatgtgcggcacgttggtgcgcagctgtttgtcgacgttgataaagccacgctcgtcaacttcaacaccggctttgccggcatccagcagtttgccgttcggcacgcggccgatcgccaccagcaccgcgtcgtaacgctgtggttctgccggcgcttttttaccttccatcgtgacgtagatgccgtcttctttggcttctaccgcggtcactttggtttccagcatcaggttgaactgcttgctgatacgtttggtgaagactttcaccacgtctttatctgccgccgggataacctgatcgaacatttcaacgacgtcgatctgtgaacccagcgcatggtatacggtgcccatttccaggccgatgatgccgccgcccataaccagcagacgctctgggacggttttcagttccagcgcatcggtagaatcccacacgcgtggatcttcatgaggaatgaatggcagttggatcggacgagaacctgcggcgatgatggcattgtcgaagttgatggtggttgggccgttttcgccttccacaaccagggtgttagcgccggtgaacttgcccaggccgttgaccactttcactttacggcctttggccatgccagccagaccgccggtcagctgagtgatgactttttctttccagacgcgcactttgtcgatgtcggttttcggctcgccgaaaacgatgccgtgttcggccagcgctttggcttcttcgatcactttggcaacgtgcagcagtgctttggaagggatacatcccacgttcaggcaaaccccgcccagagtggaataacgttcaaccagaacggtttcaagacctaagtcagcgcaacgaaaggctgcagagtaacctgccgggcccgccccaagtaccacgacctgagttttaatttcagtactcatcatgacctcttaattgattgtccggcgggtcagacgtcatttttattgctaatcgatctcataacgcccttcatccaccgggacgcttacaccgcgagcagtttacagaattgttaataatctgcaaagcgtgttcgagtgacccgtgtctcaacaattttgtcgagttatgcaaaatccgacaaaactgctacagaatcgtcaggggcgcagcatgctgcgccccttttgcattacatcaccagacggcgaatgtcggacaacatgttgttgatgatggtgatgaagcgcgcaccatcggcaccgtcgataacgcggtggtcgaaggacagcgacatcggcatcatcaggcgcggcatgaactctttaccgttccagaccggctccatcgcagacttggagacgcccaggatagccacttccggcgcgttgacgatcggcgcgaagtgagtcgtcccgataccgcccaggctggagatggtgaagcagccgccctgcatctcgcccgcggtcagcttgccgtcgcgcgctttcttggagatggtcatcagctcgcgagacagctcggtgatgctcttcttgttcacgtccttgaacaccggaaccaccaggccgttcggggtatctaccgccacgccgatgttgatgtatttcttcagcgtcagcttctggccatcttcggacagcgagctgttgaagcgcggcatttgctccagagcggcagcgacggctttcatgatgaacacgacaggcgtgaacttcacgtccagcttgcgcttggccgcttcttcgttctgctgcttgcggaacgcttccagatcggtgatgtcggttttgtcgaagtgagtcacgtgcgggatcatcacccagttgcggctcaggttcgcgccagagatcttctggatgcggcccatttcgacttcttcgatctcgccgaacttgctgaagtccactttcggccatggcagcatgcccggcagaccgccgccggcagcagccggggccgcttcagcgcgtttcaccgcgtctttcacgtaagcctgaacgtcttcgcgcaggatgcggcctttacgaccggtgcctttcactttcgccaggttaacgccgaattcacgcgccagacgacgaatgaccggagtcgcgtgcacgtaggctgcgttctcggcgaactcgcctttgtcttcagctttcgcagccggagcggcggctttagcggcggccggcgccggcgcagcgtccgctttagcggctggcgcggcggcagcggcaggcgcagcgccttccacttcgaacaccatgatcagggagccggttttcactttatcgccggtcgcgatcttgatctctttcacggtgcccgcgaacggcgcaggcacttccatggaggccttgtcgccttccacggtgatcagagactgctcggcggcaaccttgtcgcctaccttgaccatcacttcggtcacttcgacttcgtcaccgccgatgtctggcacggcgacgtctttggccgcagaggccgcaggcgctgcagcggcagccggtgcttcagccgcagccggagcagcagcggaagcggcgccggccacttcgaacaccatgatcagggaaccggttttcactttgtcgccggtcgcgatcttgatctctttcacggtgcccgcgaacggcgcagggacttccatggaagccttgtcgccttccacagtgatcagggactgctcggcttccaccttgtcgcccactttcaccaggatctcggtcacttcaacttcgtcggcgccgatgtccggcacggcaacgtctttggcagcagcggcagccggggcagctgctgctgccgccggtttttcttccgctttcgccgccggtgcagcttccgctgcgcctgccgcttcgaagatcatgatcagtttgccggtttcggttttatcgccgaccgccactttgatctctttcaccacgcccgcctgcggggagggcacctccatggaagccttgtcgccttccacggtgatcagcgattgttccgcttcaactttatcgccgaccttcaccagaatctcggtgatttcgacttcatctgcaccgatgtccggtacgttgatttcgatagacattattcagtacctcttaggccagacgcgggttaactttttccgggttgatgtcgaatttcttgattgcgtcagcaaccacagaagcttcgatctcaccgcgtttagccagttcacccagagcagcaaccaccacgtaggacgcatcgacttcgaagtggtgacgcaggttttcgcggctgtccgaacgaccgaagccgtcggtgcccagtacgcgataatcgctggccggcacataagtacgaacctgttcggcgaacagtttcatgtagtcggtagaggctaccgccggcgcgtcgctcatcacctgagcgatgtaaggcacgcgtggcgtttcggttgggtgcagcatgttccagcgctcgcaatcctggccgtcgcgcgccagttcggtgaacgaggtcacgctgtaggtgtcggaacccacgccgtagtccttcgccaggatctgcgcagcttcgcgcacgtggcgcaggatggcgccggagcccagcagctgcaccttgcctttgctgccttccagcgtttccagcttgtagatacccttgcggataccttcttccgcaccctgcggcatcgcaggcatgtggtagttttcgttcagcgtggtcaggtagtagtacacgttttccgggttgtcgccatacatgcgcaccagaccgtcgtgcatgataaccgccacttcgtatgcgtaagccggatcgtaagagatgcagttagggatggtcagagactgaatgtggctgtggccatcttcgtgctgcagaccttcgccgttcagggtagtacggcccgaggtcccgccgatcaggaagccgcgcgcctgttggtcgcccgctgcccagcacaggtcgccgatacgttggaaaccgaacatcgagtagtagatgtagaacggaatcatcggcagatcgttggtgctgtaggaggtcgctgcggccagccaggaagaggctgcgcccagttcgttgatgccttcctgcaggatttggcctttctcgtcttctttgtagtaagcaacctgctcacggtcctgcggggtgtactgctggccgttcgggctgtagataccgatctgacggaacagaccttccataccgaaggtacgcgcttcgtcggcgatgattggcaccaggcgatctttgatcgacttgttcttcagcatcacgttcagggcacgcacgaaggcgatagtggtggagatctctttgttctgctcttccagcagcgagctgaaatcttccagcgccggcatttccagcttctgggtgaactccggcagacgggtaggcacgtagcctttcagcgcctggcgacgttcgtgcaggtatttgtactcttcggaatctttctcgaaggtgatgtacggcagtttttcgatgtcagcatcggcaaccggcacgttgaaacgatcgcggaagtggtgaaccccttccatgttcattttcttcacctggtgagcgatgtttttaccttccgcggtttcacccatgccgtaacctttgatggtgtgggccaggataacggtcggtttgcctttggtgtcctgcgcttttttcagtgcagcgaagattttcttcggatcgtgaccaccacggttcagcgcccagatttcgtcgtcggtcatgtctttgaccagcgccgcggtttccgggtaacggccgaagaagtgctcgcgcacgtaagcgccgtctttggatttgaaggtctggtagtcgccgtccagggtctcgttcatcagctgaaccagtttaccgctggtgtctttgcgcagcagctcgtcccaacggccgccccagatcactttcagcacctgccagcctgcgccggagaagatgccttccagttcgttgatgatcttgccgttaccggtgaccgggccgtccaggcgctgcaggttgcagttgatgacgaacaccaggttgtccagcttctcgcgggtggcgatggtgatggcgcctttggattccggctcatccatctcgccgtcgcccaggaaggcgtaaacggtctgctcagaggtgtctttcaggccgcggtgttccaggtatttcaggaacttcgcctgatagatggcgctgattgggcccaggcccatggatacggtcgggaactgccagaattccggcatcagcttaggatgcgggtaagaggacaggccgttgccgtgcacttcctgacggaagttgttcatctgttcttcggtcaggcggccttcaaggaaggcgcgcgcgtaaacgcccggagagatgtggccctggaagtagaccaggtcgccgccgtctttctcgttgcgtgcgcggaagaagtggttaaagcagacttcatagaaggtcgcggaagactggaaggaagccatgtggccgcccagctccaggtctttcttggatgcgcgcagaacggtcatgatcgcgttccaacggatcgcagagcgaatgcggcgttccagatccaggttgcctgggtaagccggttcgtcttctaccgcgatggtgttgacgtagttgtgcgccgcagcaccggccgcaacgttaacgccgcctttgcgggcttctcccaatacctgatcaatcagaaactgagctcgctcaacaccctcttcacggatgaccgattcgatcgcctgcagccagtcgcgggtttcgatcggatccacgtcattgtttaaacgttctgacatggtggtattccttatctgtctaatggtttgtttggagcctgtcttcctgtgttctgtgccaaaacacacgaagacaggcccatcagtttagttgccgcttaagtacttaactaagtacctcgaacttaacccccgcaggctggtgtaccctgaagaggacagctcttaatccttgcgttgctggagacgccgcagcgatctctcgcgccgagtatgctcccggctgagatccagcaagatttcctcgataaacgccaagtggcgatgcgaggcttcacgggccttttccggctcgcgtgccacaatcgcctcaaaaattccggcgcggtggctgctcacttttgccaacatctcacggcgcgagtagagcaattcaaagttctgacgcacgttctgttccagcatcggccccatgcagcgtagcaggtgaagtaacacaacgttgtgagcggcttcggtcacggcgatttgatactgcatgaccgcatcggcctcggcgtcgagatcgccgctgtcttgagcctgttgaatcacgatatggcagtcgcggatgcgcgccagatcttcatcggtgccgcgcagcgccgcgtaataggcggcaatgccttccagcgcgtgacgggtttccagcagatcgaactgtgattcgggatggtcggccagcagctcggccagcggatcgctgaagctctgccacagattagtttgcacgaaggtgccgccgccctgacggcgcaggagcagccctttcgcttcaaggcgctgaatggcctctctcagagaaggacgggagacatcaaattgtttcgccagctcgcgctccggaggcagtttttcgcctgggcgcagtgtcccctcgaggatcaggtattcgagctgttgctcgataacatctgacaacttgggttggcggattttgctgtaggccatgagtgaattcttctctgcgaatggcgcggagtcaattggtaataccaatttcaaaaacgtgacggtaaagtaacaaagtattcacctcctgtccatacgggccttgatcgaaatcaggttacccgcacattttaacaccccgctgaaaaccccgctgcaaaccggtaacgccgtgatggtattaccatttacgcggcgggttggggatttaacttttaccaaaccttacgcaaggcagagtgcaaactttttgcccgagttttattgcatggttattacgctttaatgaatggctatttggcgagcagcgcaacggcggttcgttcattatttgaacgcagcccaccgttcagatctacgttatttttgcgcattatgtgatttgttgcttatttcatgcactgaatccccccctgccgtcacacaacccgcattttgtttcctaaactgctgcaatcttaatcactcacacgacaaagcaggtgcaaaccgacgcgcataacattattctctgccaaacggtagcggctccgtggaattaatagctataacgccgtaaataaaacaaaacacacatcgtaaccactgctttacaggcaggtgggcattcacaacgacagagggttagattgatggatggtcaacagcatggtgaccagctgaagcgcggcctgaaaaaccgccatattcagctcatcgccttaggtggcgcaatcggcaccgggttatttctcggtatcgctcaaacaataaaaatggccggcccgtcagtgctcctcggctacgccatcggcggcttcatcgcatttctgatcatgcgccagttgggggaaatggtggtggaagagccggtcgccggctccttcagccacttcgcctacaaatactggggcaacttcgccggcttcgcttccggctggaactactgggtgctgtatgtcctggtggcgatggcggagctgaccgcggtcggcatctacgtgcagtactggtggccggagatccccacctgggtttctgccgcggtattcttcctggcgatcaacgccatcaacctggccaacgtcaaagtttacggcgagatggagttctggttcgccatcatcaaagtggtggcgattatcggcatgatcgtgttcggcgcctacctgctgttcagcggcatgggcggcccggaagccaccgtcaccaacctgtgggcgcagggcgggttcttcccgaacggcgtcatgggcctggtgatggcgatggcggtgatcatgttctccttcggcggcctcgagctggtcggcatcaccgccgccgaagccgacaacccgcaaaaaagcattccgaaagccaccaatcaggtgatctaccgcatcctgatcttctatatcggttcactggccattctgctgtcgctgtacccgtggggcaaagtggtcgaaggcggcagcccgttcgtgctgatcttccacgcgctgaacagcaacctggtagcgaccgtgctgaacatcgtggtgctcaccgccgcgctgtcggtctacaacagctgcgtctactgcaacagccgcatgctgtacggcctggcgcagcagggcaacggcccgaaaagcctgctgaaggtcgacggccgcggcgtgccggtggtggccatcggcatttccgccctcgccaccgcgctgtgcgtgctgattaactacctgatcccgggccgcgccttcgaactgctgatggcgctggtggtgtcggcgctggtgatcaactgggcgatgatcagcctggcgcacctgaagttccgcgccgccaaaaaccgcgaaggcgtggtgccgaagttcaaagcgttctggtacccgttcagcaactacctgtgcctgctgttcatgtccggcatcctggtgatcatgtacctgacgccgggtattcaaatctcggtgctgctgatcccggtgtgggtggcgatcctggccgtcggttacgccatcaaacagcgcagccaacgcgtcgacggcgtcaccagccgttgaatcccgcgaccgcgcaataaaatggcccgcagatgcgggccatttttttttgcctgaacgccgcttacttgcgcagcgctttcacctgctcggcggtgatgtccgccggcaaaccgccccaggtcacccgcaggtaatttaccagttccgccacgtcggcatcgctcaaacgctcgccgaagcccggcatgctctgcatgctttcaccgttcgggaactgctgggccggcaggccgtccagcaccgacacgatcaggttcttgccgtccgcctggcgcagcgtggcgttatcgcgcatcgccggcgcgacgtgcggtttgccctcgccttcacgtgcatggcagccggcgcactgatccagatagaccatacgcccggcatcgctgccctgccccattttcaccggcactgccgccggcggctgctcgcccatcagatacagcgccagcgcctgatggtcttccggcgtcaaataacgggtgctgagatccaccaccatatgcatctcgctgaaggccgaaccctgcggcgcaaggccggtgccgaggaagcggctgacgtcctgcggcgtccagccgcgctgcgccagaccgtgcggcgtaatgtccggcgccatgaagcggccgagatcgccgccctgcatcggcttgccgagatccatctgccccagcgcgccgcgcggcgtgtgacattcgccacagtggcccagcacatcggccagatagcggccgcgctgccattgcggcgagctgccctgcgagctggccggcagcggatcctggctgcggaacagcaggttccagccgatcagcgccatgcgctggttgaacgggaacggcatctcgttagccggaatggccacatccaccgccgggcgcgtcatcaggtaagcgtagatgtcgtcggcgtcctgacgcgacatgcccttatacgaggtgtaaggcatcgccgggtacaggtgccgcccgcccggcgccactccctgcgtcagcgccaggaagaagtcgtccttgctccagcgcccgatgccgtggtcggccgacggcgtcaggttgctgccgtaaatcgtgccgaacggcgtttccaacggatagccgccggccaacggcgccccgccgctggcggtatggcaggcggcacagtcggcggcctgcgccagatagcggccgcgggcgatctgttcggcgccggcggtcacctgctgcaccgggccgtcgtaacggcggttttcccgccaccacagcagcgcgatcaccacgatcgccaccagcacaatcaacactgcgagacgttttttcattgcgccgtctccttcagcaggcccggcgttttcagcaccacgtcgcgcaccgcttcgtaatagcgcacgtagccggtgcagcggcagatgtggctgtccagcgcctgctcgatggcgttctccagctgatcgcgggcgatcggctcacgcttgagcttttccacgaaaatggtggcggcgttgacgaagcccggcgtgcagtagccgcactggaagctgtagtgctccagaaacgcctgctggatcggcgacagctcaaccacctccccctgttcgtccaccctggcgtggccttcgacggtgcgcactttcttgccgttgaagaaatgcgcgccggtgatgcaggtgcgcacctcttcgctggtgccgctcgggtgatcgacaatcgccacgcaggcatggcaaatgccctgcccgcagccgaggcgcgaaccggtcaaatcgagatactcgtgcaggaaatcgatcatcatcaagccttccggcacctcgatcgggccgtactgtttctcgttgatggtcagggaaatcggctgggttttaatgctcattgtaatacctcacgaatattttctgcacgaacgggcaaatcacggaaacggtggccggtggcgtcggcaatggcgttgaccagtgcggccacgatcgggatcatcaccacctccgccatgcctttcggcggatcggtttccgacagcgccggcaggatgtcgccgctctgtttccacaccgccacgtcgctggcgcgcggcaggtggtaacggttgaagttccaggtgccgttgcccgggccgtcttcgtacagcggtaaatattcgtgcagcgcatggccgatgcccatcgccagcccgccctgcagctggccggaaaccagttccggcacgatcaggttgccgcactccatgatcgaatggtgattcaacaactccacctggccggtggcgatatccaccgccacttccgccagcgtgccgacggcgctgtagtaggtcactgccgcattgttgcgctgggtcggcgggtagtagacctgcccgcgcgccagcggcttgaattcaccgttggcattgcgcagcgccatgccgtcgatcggcaggcgctcgcttttgccgttcaacgtgaaatcggcctccgcccactgccagcggttgaagacgtgcaccgccgcgccggtgacaccgcccatctgataagccgtcttggccagcagctcgaggctcagcaccgacatgcccgccgccgtcaggccgccttcgacccaacgcgcatcttcgcgccgcaccaccagcggcgccgcctggccgccgccgatgccggcctgccacagcgccatcgccgccggccacaggccgtgatcgaagatcaggcgcgccgcttcgcgggtactgtgcgagaagtaataggccgagttgctggcgctcgacggcgaacagtagctcggcgtccagttggggttggtttgcagcttatcctgctcttcctgcgacatcaggtaaggatcgccgctggtgaccatcggcaataccgaccagtcggtgaccgagaagtgggcttcgtcggccggtttgcccagccactgcgcgcacaataccgactgcgaggtcgacatgccggtgcccatctccgcgccgctgtgatgcagcgtgatgcggccgtcttcgctcagctccacccgggcgaacgaggtttccgccccggtgccgaaatctttctgcacgcagccgaagccgacgccatagcgcttgccgggatggcggctctcaaactcggccttgcgttcggcgcgcttgagccacatctcgtgcttcgccgccttctccagcacttcatcagcgcggatcgcaccggccgggatcgccccctgggtgtttttcatgccggatttcagcacgttgcgcaggcgaaactcgatcgggtcgatcttcagctcggcggccagctcatccaccatcatctcggtggcggccatgctctgtagcgtgccgtaaccgcgcgccgagccggcatcaatggcgcgtgaggccagcccgaccgacgacagatcgcttttcgggaagtagtaaatcgactgggcggcggtcgcgccgaccatcaccaccgaaggggtaaagttgctgcggccgccgccgtccgcggtcatgtcaccgaggaaagactgcatgacgccggtttgcttattcaccgcgatgcggtagttcatgtcgaacgcatggcgcttcagcgccgtctggaactgctcgaagcggtcattggccaggcgcaccgggtggccgtcgccgtacatcgccgccaccgcgccgtaatacgggaagttgtagtggtctttcgaaccgtagcccacggtgtagcacgggtgcaggatcagctgtttcaccggcggattgcgcttggccagcatgcgcggcatctcgtcggccacttcctgcggcgactgagtcggcaccaccagatgcagggtttgcgtctgcgcgtcgaaccagccattggcgttgtccggctccagcgccgaggtgtcgatcgactgcgtggtgtagcggcgcgacattaccagccagtcggccggcggattcgccaactcgtcggcgatcaggcccgcatagcgcatgccttcctgatccagcttgccgccctcgcgcccttccggccacaccggcagatgttttttcatcgataccgggaagatcggcgtatccttcaggctggagaagcgatcgtcgtcgaacggctgttctccccccacccgcacgtaacggaaactgccccagggatcgcgctccagcgggccggtgaccgcgccgtatttgatggtttcctcacggaatttcagcttgtccttggcgaagcggaaacgggcgaagtcgtgatagatcaggatcgccactgcctggccgagataggcaggggttttgccgttcggcagcagcatgtcgtcaccgtagaacgccggaaaggccaggccatcgcgcgccagatcttccgccgtcaccaggcgatcgggctgcagatcgtcccccagcagcgacagatcgaccccctcgaacagccggtcggctttggtcacgcgcagaatgaaggcgtgcgcctgtttctgcggccagtgcggcatgtccaccgcgcggatatcgcgtgcgaacaccttctgccccatgaccttggcgcggccgtcgatacggaaacgcacgcgcttggcctgcggatcccagttgggtgactggaggattttttgctcgaacagcgcggcgtaggcgcggctgtacaggggggcgaggtacacggagacccccgcaatcacggcgcttttgatgaagcggcgccgcgacgggttgaaattgctcataaataagtccttcacgtctttcttgtaattggtttttgttcgcggtgttgttgcgcaaacgctgacgaccttgccgtagacgtcataagcatatgcttataactaaaattatgtgatgattaacaggctgttttcaacaaaaaaacatttacaaaacacaggtagtttgtaggctaataaataatttgcgcaaacgcggacttcaaccatgaccacgggcattgtcattaccgccgccggacgcggagagcgctttattcaggccggcggccagggcaacaaattgaacgccgggtttgccgatgcggcgggcgagcggcgttcgctgttcgagcacaccctatgccaggcgctggcctccggcctgccggtacaggtggtgacccggccggataatctgccggtactggcagcctgcgccgccaaccaggtgccggtcaccctgctcgccagcgcgggcctcggcgactcgatcgccgcaggcgttgcggccacgccgcactggcaaggctggctgatccacctggccgatatgccattcgtcggcgccgacgttttccgacaggtggcggatgccttacggcagcacccgatcgtgcgcccctgttatgcgcaacagcccggtcacccggtcggcttttccgcccgattgcgcaaaccactttgccaactgcgcggcgataatggcgcccgtgggctgctgcaaggcgcagcagtccacctgctgccgcttgagcaccccggcgtcgtgcgggatattgatcttccatcgcaactcccggccagcgagtaaattcacctatgcaacatcttgatgtcaccgtggtcagccaggcgataagctggctgcaacaacagccggtttggttatgcaccgtgctcagcacctatggctcttcgccgcgctcgccgggcgcgttgatggcggcgacccgcgacggccgctacagcggctcattgtcgggcggatgcgtggaggaggactttctgcggcgcgtggccgccggggagtatcaggcggccagccaggtgattcgttacggcgaaggcggcatgacgcccaatgtagcgctgccgtgcggcggcgtgctggacgtgctgatcgagtatctgccggcgggagaagccagcgtcgcttacctgcagcgcatcgccggcgcgctggaagggcatcacgcgttgctcaaacgcctgacgctgcccaacgcctgccacagccttgagcagagccacttcaccagcgccactcaggtcgaacgccggctcgagcagatcaccctgcacatcgcggccgcgccgcgcctgctgatcgccgggctgtccagcgtggcgctgtactgtgccgatttcgccgtggcgctggggtttgaggtgctggtgtgcgagaaccgcccggaggcgctggacaacttcgccgccgagctgaagcccggcgtgacgctgctgcgccagtttccggccaagttcatcgaagaggggggctgccacgccaataccgccgtcgtggcgctgacccacgatccgcgtatggacgatctgacgctgatggaagcgatccacaccccggcgttttatatcggcgccatgggctcgctcagaaacagcgcgcgccggcgccagcggttgcagcagatcgccgagttcacgccgcaggagctggaacgcatccatgcgccgatcggcctgccgctcggcagcaaaaccccggcggaaatcgccctggcggtgatggcggcgatcgtgcagcaaaaaaaccggctgccggccgccgacgggatcaatgcagcggcaccaccggcaccagatgctgcagctccaggtgcaactcctctttcccgctcagcgaatagctgaacaccgtcatgtccggcccgtcgccgcgggccagccccatttcgggcagcacctgcgtgtagatttgaatgatgtgatcattgagcgccaccggcttgccggaatagcgaaaacggcaaaactcgccgtggatctccggcagcggctccagcgccacgccctcacgcagcgggtagtccgccgtcacgcccagggtatagtcgaccctgacccgctcgccgtccggcaccagttgggtaaacgaatagatttgcgccggacgctcgcccaacaaagtgtagaactgcgcccgcagcgcgctgcgctgcggcagatgcgacttatccaacttttcgatatccaggtgataagcgtactgtttgccgtgaaaggcgtattgccctctggcgatgctgacgcgttcgacctgaatatcgccaggctggctggccgccagcgaacgcaccagattgctgaagtcctgtttgcgggcatgacgatacacgctgggcgattcggcgaagtgtttcttgaaacagcgcgagaacgtctgctggttatcgaattgatactcgaccgaaatatcgaggatgctcttctgcgtgaaacgcaaggcgaaggcggcgatgtagaggcggcgagcgcgaatgtaggaagctaacgataatccggtctgcttcttgaacatgcgctgcaggtaccatttcgtatagcctgacttggcggaaacgatatccaacgacagcggattggtcaggttatcttcaatccagaccagcagttccctgatatgattttcctgcgttcccatgtgcttgctgaaaccttctgttgccgatattccattagtcgaattttagtgctattcgcgtagggtatacaggttaaaactcggcgtccagcaagctacaggactttacacaaccccctccaccgcccgcgggcggtggagggggagaggcgattatttcaggcagctggaacactgaccggcctggatcttctggaagaagtcattgcctttgtcatccaccaggataaacgccgggaaatcttccacttcgattttccagatcgcttccatgcccagctcagggtactccacgcactccaggctcttgatgctctgctgcgccagcaccgccgccgggccgccgatgctgccgaggtagaagccgccgtgcttgtggcaggcatccgtcacctgctggctgcggttgcctttcgccagcatgatcatgctgccgccgtgggattgcagcaggtcgacgtaggaatccatacgcccggcggtggtcggccccaaggaaccggacgcatagccttccggcgttttagccgggccggcgtagtagatcgggtgatccttgacgtactgcggcaggccttcaccgcgatccaggcgctctttcagcttggcgtgcgcgatatcgcggccaacgatgatggtgccgctcagcgacaggcgggtggaaaccggatactgcgacagctgtttgaggatctcggccatcgggcggttgagatcgaccttgatcgcctcgccctccccggcctggcgcagctcctgaggaatgaatttacccggattgtgctccagtttttccagccagatgccgtcgcggttgatcttgcctttgatgttgcggtccgccgagcaggagacgcccatgccaaccgggcaggaggcgccgtggcgcggcaggcgcacgacgcggatatcatgtgcgaagtatttgccgccgaactgtgcgcccagccccaggttttgcgcttcttgcagcagttccgcttcgagttccagatcgcggaacgcctggccatgctcgttgccttccgtcggcaggccatcgtaatacttggtcgaggccagtttgacggttttcagcgtcgcttccgccgaggtgccgccgatgacgaacgccacgtggtacggcgggcaagccgcggtgcccaacgtacgcatcttgtcgaccaggtagtttttcagtttgcccggcgacagcagcgccttggtttcctgatacagataggttttgttggcggaaccgccgcccttggcgatgcacaggaacttgtactcttcgccgtccacgctgtagagatcgatctgcgccggcaggttgctgccggtattgacctctttgtacatatccagcgcggcgttctgcgaatagcgcaggttctcttcgatgtaggtgttataaaccccgcgcgacagcgcctcttcatcgccgccgccggtccagacgcgctggccctttttgccgacgatgatcgccgtgccggtgtcctggcaggtcggtaaaatacccttggcggcgatttctgagttacgcagaaattgcagcgcaacgtacttgtcgttttcgctggcgtccggatctttgaggatatcggccacctgctgttggtgcgccgggcgcagcatgaacgaggcgtcgtggaacgcatgctgggcaagcagggttaacgcttcaggggcaactttcagaatttcctggccttcaaattcgctcacggaaacatggtcgcggctcagcaggtaatattcggtatcgtctttcttcagcgggaacggatcttgatagtggaacggtttattcgacattgatctctcacttgcaacatcagctgcgttaaattcacacttgcggcgcgcgacacggcgccttgtcaaaaaactgcctccaccttacgtatttttaatcagtcagttattgcgccaaatcgcaaaataaccgctctttgcgtaaggaattaccacaggcggcgtttcaaccttgctcggtgagaactgcgggtacaggctcatcatgcacgctttattatcccgcagttaacacattgattacaatccatcggcagcgatcgtcttatcaatgtggtgaaaaagcgccggatgcgatttgcgccggggcatattgtcagccgccgcgccattgcttaagctagccgcaatgaacaaaccgagaatccccatcgcgctgcaacaagcggtgatgcgctgcctgcgagaaaagctgcagttggcccgccagcattttgccgtcgaattccccgaacccagcatcgtctatcagcaacgcggcaccagcgcgggcaccgcctggctgcaaagctgggaaatccgtctgaacccggtgctgctgctggaaaaccaacagccgtttatcgatgaagtggtgccgcacgaactggcgcacctgctggtgtttcgccaattcggccgggtagcgccgcacggccgcgaatggcgctggatgatggaaagcgtgctgctgacgcccgccagccgcactcatcgtttcgaaaccgcctcggtgcaaagcaaaaccttcccctaccgctgcggctgcgggcagcaccagctcaccattcgccgccataaccgcgtgctgcgcggcgaaagcgaataccgctgccgccggtgcggcgaaaaactgaaatttcttgctagcgagaacctttagttaaacgatttatacgttaaaacaagtaaatatcgccatttgccactgccgacaagttccgttaccctgcctgcttttccaattttgagctgttttggaatatgcttcgcagaattttgtttatggcggttttcgccgcaggcgccgcacaggcgcacggcatcaataacttctctcaggccaagacggcggcggccaagattaaccaggatgcgccgggcagtttttactgcggctgccgcatcgagtggcaaggcaagaagggcattcccgatctcgccggctgcggctatcaggtgcgtaaaaacgcccaacgcgcgcaacgtatcgagtgggaacacgtggtgccggcctggcagttcggccaccagctgcagtgctggcaagacggcgggcgcaaaaactgcaacaaagacgccacctatcgccagatagaaaccgatctgcacaacctgcagccggcgatcggcgaagtgaacggcgaccgcaacaacttcatgtacagccaatggaacggcggcgcaggccagtacgggcaatgcccaatgaaggtggacttcaagaataaacaggcggagccgcccgcccgcgcccgcggcgccattgcccgaacctacttctacatgcgcgatcgctaccagctgcggctgtcacgccagcaaacccagctgtttgaagtgtggaaccggcaatatccggtgagccaatgggaatgtcagcgcgaagcacgtatcgccaaggtgcagggcaaccacaacccctatattcaacaggcttgtcagcagcggaaaagctaacctactatagcctttatctttcatggcgccgccaacccgcggcgccgtttcgtcaggatcagactacccatgcgcataccccgcatttaccatccgcagccgttgaccgaccgggcggagatcgccctcagcgaggacgccgccaaccacgtcgggcgcgtgctgcgcatgagcgccggccaggcgctgcagttgttcgatggcagcaaccaggtgttcgacgccgaaataatccgggtggacaaaaagagcgtgctggtgcgccttggcgacggccgcgtggatgacatcgaatcgccgctcaacctgcatctgggccaggtgatctcgcgcggcgagaagatggagttcaccatccagaaatccatcgagctgggcgtcaacgtcatcaccccgctgttttccgagcgctgcggcgtgaagttggacggcgagcgtctggcgaagaaaatccagcaatggcaaaagatcgccatcgccgcctgcgaacagtgcggccgcaaccgcattcccgaaatccgcgaggcgatgtcgctggaggcctggtgcgccgagcaggacggcagcctgaaactcaacctgcacccgcgcgccagccacagcatcaacacgctgccgcagccggtggatcgcgttcgcctgctgataggcccggaaggcggtttgtccgccgacgaaatcgccatgaccaccgaccacggatttactgatattctgctgggaccacgcgttctgcgtaccgaaaccacagcgctcaccgccattaccgctctgcaggttcgcttcggcgacctgggttaaaggagaaaagatgattaagctcggcatcgtgatggacccaatcgattccatcaacatcaagaaagacaccagcttcgccatgctgctcgaagcgcagcgccgcggttacgaattgcactacatggagatgaacgatctctatctgcatgccggcgacgggcgcgcacgcacccgcctgctgagcgtgaaggaagacaaggagagctggttcagcttcggcgccgagcaggatctggcgctgcacgagctggacgtgatcctgatgcgcaaagatccgccgttcgataccgaatacatctacgcgacctacattctggaacgcgccgaagttaaaggcacgctggtggtcaacaagccgcaaagcctgcgcgactgcaacgagaagctgttcaccgcctggttcccggagctgacgccggatacgctggtcagccgcagcgccgcgcacatccgcaaattccaccagcagcacggcgacatcatcctgaagccgctggacggtatgggcggcgcgtcgatcttccgcgtgaagcaggacgatcctaacctgtcggtgatcatcgaaaccctgaccgaacacggcagccgtttctgcatggcgcagaacttcctgccggcgatcaaggacggcgacaagcgcatcctggtggtggacggcgagccggtgccttactgcctggcgcgcattcctgcgcagggcgagacccgcggcaacctggcggccggcggccgcggcgaagcgcgcccgctgagcgagagcgactggaaaatcgcccgcaccgtcgccccgacgctaaaagagaaagggctgatcttcgtcggcctggacgtgatcggcgatcgcctgactgaaatcaacgtcaccagcccgacctgcgcgcgcgagatcgaggcggcattcccgatttcgattaccggcatgctgatggacgcgattgaaaagcgcctggcggcgaagtaatgcgcaatgcgggcggcatgccgcccgctgttctgcatggcgcccgccaaagcgcgccttgaaaggcggcgggtatagccgcatactggcggctgtttattttctcacccattgattaccttatactaacgccatgaatttacagcaccattttctgatcgccatgccaacgctgcaggatcctcgcttcaaacgctcggtgatttacatttgcgagcacaatgaagaaggcgccatgggtttggtgatcaataaaccggtggagcagttcacggtagccacggtgctgagcaagctgaagatcatgccgcctgcgcgcgatccggccatcagcctggacaagccggtgttcgccggcggccccctggcggacgatcgcggatttatcctgcatacgccgcgccacggctttggcgccagcattcaaatttcccccaacaccatgatcaccacctcgaaagacgtgctggaaacgctcggcacgccggagcaaccggacgacgtgctggtggcgctgggttatgcgggttgggaaaagggccagttggagcaggaagtattggaaaacgcctggctgaccatcgaagccaacaccgacattttgttccgcacgccgatcgccagccgctggcgcgaggcggggaaccttttgggtatcgacattcgcagcatcgccaaccacgcaggacacgcctgatgagtaaccgcaccattatcgccttcgactttggcaccaaaagcatcggcgcggccgttggccaggagttgaccggcagcgcccgcgccctgccggctttcaaagcgcaggacggttcgccggactggctgaaaatcgaaaaactgctgaaggagtggcagccggatttggtggtggtcggcctgccgctgaacatggacggcaccgaacagcccgttaccgcccaggcgcgcaagttcgccaaccgcctgcacggtcgcttcggcatccagatcgatctgcatgacgagcgcctgagcaccgtggaggcgcgcgccaacctgttcgatcgcggcggcttccgcgcgcttgataaaggcagcgtggattccgcctccgcggtggttatcctcgaaagctggttcgaacggcagctgggttaacccctcgttccctcccccgcgcactcccccaacacgccggcgtcgatccgctgctgcaaaccctgctcaaaggtttgcatgccggactgcgcgccggtttgcaacacgctcgccaactgatgggttttcccttcgcggatcaggttgctgaccgccgccgtcgccgtcagcacttcaaagatcgccacgcgtccgccgccggggcgcctcatcagcttttgcgcgatcaccgcttgcaggctgcccgccagctgggcgcgcacatagggtttctcttccgccggaaacacgtccaccagccgttccaccgcctgcggcgcgctgcgggtatgcagcgtcgccagcaccaggtggccggtctccgccgcagtgagcgccagccggatggtggcggtatcgcgcagctcgcccagcaggatcacatccggatcttcgcgcagcgcggcgcgcaacgccgcatcgaagctgtggctgtcgcggccgatctcccgctgctggatcagcgatcgccggctgcggtgcaggaattcgatcggatcctccagcgtcaaaacgtgccgcggctggtgccggttgatctcgtcgatcatcgccgccagcgtggtggacttaccgctgccggtggcgccggtgaccaggatcaatccgtcggcgcgccgcagcagcgccgggacgatggccggcgccgccagctcggcaagcgaaggcgactgcccggcgatacgccgcaacgcgagagaaattcccgcgctttgctgaaaaacgttggcccgcagccgttccccgctcggcctgtgcagcgccagatcgacctgccccagccgccgcaggctctcgcgctgctgcgcattcagcaatccgtcgcagagcgcttgcacgccttgcgccgtcagcgttggcgccgccgccagcggctgcagttcaccgtcgatgcgcaacatcggcggatgaccggcacaaaggtgcagatcggaagcattatgctttacactaagggccacgaattcatcgatatccatatcactctcccgggtcaataatgagcactatccaacagaacctgcaggatgtcagaaaccgcattgcggccgccgcgcgaaattgtgcgcgggcgccagaagaagttgccctgcttgccgtcagcaaaaccaaacctgtggcggcgatcgaagaagccatcgccgccggccagcgcgccttcggcgagaactacgtgcaggaaggggtagacaagatccggcatttcgccgagtcgccgcaaagcggcgagttggtgtggcactttatcggcccgctgcaatccaataagagtcggctggtggcggaacacttcgcctggtgccataccgtggatcggctgcgcatcgcccagcgcttgagcgatcagcgcccggccgacatgccgccgctcaacgtgctgattcaaatcaacatcagcgacgagcaaagcaaatccggcattgcgttggccgagctgccggcgttggccgaagcgatcgccgcgctgccgaacctgacgctgcgcggcctgatggctattccggcgccggaagcggattatcagcggcagctggcggtattcagccggatgaacgacgcatttctcgccctgcgtcagcgttatccgcaggccgatacgctgtcgatgggcatgacggacgatatggcggcggcgatcgccgccggcagcaccctggtgcgcatcggcaccgcaatttttggcgcccgcgactactcgcaggcctgacacacagacgagggatttgatgcaacatcgcaagattacctttatcggcgccggcaacatggcgcgtgcaatcatcgccggcctggtggcgggcggctatccagccaaatccatcagcgtctgcgccccttcgccgaaaaaccgtgatgcgctggccgcagactacggcatcgtcagcagcggcgacaacgtcgcctgcgcgcgtgaagccgaggtggtggtgctggcggtcaaaccgcagatgatggccgacgtgtgtcagccgctgcgcgaacaggtcgacttcagcggcaagctggtgctgtcgatcgccgccggtattcaggtcagccgtttctatcagctgctcggcgacaagctggacatcgtgcgcatcatgcccaacactccgtcgctggtcggcaagggcatgagcgggctgtacgcgccggcgcaggtcagccagcgggatcgcgattacaccggcgatttaatggcgtcggtcggtaaagtttgctgggtcgatgacgaaaatggcatcaacggcgtgatcgccgccgcgggtagcgccccggcctatttcttcctgtttatggaagcgatgcaaaaagaggccgagcgcatgggcttcgacagccagaccgcgcgcgatctggtacaacaggccgcttccggcgccgccgcattggtggaagccaacccggatacgccgctgggcacgctgcgcgagcaggtgacctccaaaggcggcaccaccgccgaagcgctgcgggtgttcaacgaacgccaactgccggaaaccgtagcgcaagcgatgcaggccgccgtttcccgtgcccaagagatggaaaaattattttaaataaccgcgagttaaggagaaggaccacttcatgctaacgctgactttcctggtcaagaccgttattgatctgtacgtgatggtgctgttgctgcgcatttggatgcagtgggcgcgcaccgatttttacaacccgttctcacagtttgtggtgaagatcacccagccggtggtcggcccactgcgccgcatcatcccgtcactggggcccatcgacagcgcttcgctgctgctggcgttcctgctgatgaccatcaaatacccgctgctgctgctgattcagggcggcgcgatgtcgctcagcccgtataacctgctgttcggcctgatctcgctggtgaagtccgccggctacctgatcttctgggtgatgatcattcgtgcgctgatgagctgggtaagccagggccgcagcccgatcgactacgtgatgtaccaactgaccgaacccttgatggcgccgatccgtcgcatcatcccggcgatgggcggcatcgacttttccgccatggtggtgatcctgatcctctatctgatcaactacctgggcatggatctgttcggtgagatctggttcctgctgtgagtgcagtcactccggtgctggacgggctggcgatcaggctatatattcagccgaaagccagccgcgaccaaattatcggcttgcatggcgacgaactgaaagtcgccatcaccgccccgccggtcgacggccaagccaacgcccatttgatcaagtttatcgccaagcagttcaaagtggcgaaaagcaacgtcaccatcgagaaaggcgaactggggcggcataaacagttacgcatcgtgaatccgcaacagatccccgccgtggtcgcggcgctcatcgaataattttcaaggtagtcatttatgcaaaaagtcgttcttgccaccggtaacccgggcaaagtgcgcgaactcgccgacctgttggccgatttcggcctggacgtggtcgcacaaaccgatctgggcgtggagtccgccgaagagaccggcctgacgtttatcgaaaacgccattctgaaagcgcgccatgcggcacaggtcaccggcctgccggcgatcgccgacgactccggcctggcagtggacgcgctgggcggcgcgccgggcatctactccgcgcgctatgccggtgaagatgccgacgatcggcagaacctcggcaagctgctggcggcgatgaaagacgtagcgccgggccggcgcggcgcgcaattccattgcgtgctggtctatctgcgccatgcggcagacccgacgccgctggtgttccacggcagttgggccggcgaaatcaccgagcaggccgccggtgaaggcggcttcggttacgatcctgtcttttacgtgccggagctgggccgcaccgccgccgagctgagccgcgacgagaagcgggcgatttcgcaccgcggcaaggcgctgaagctgatgttggaagccatgcgcaatgcttaagctgcccccgctgagtctctacatccatatcccgtggtgcgtgcagaaatgcccgtactgcgacttcaactcccatgccctgaagggtgacgtgccgcatcaggagtatgtcgatcatctgttagcggatctggatgccgatctgccgctggccggcggccgggaaatcagcactatctttatcggcggcggcacccccagcctgctgagcgccgaggcgatgcaggccttgctggacggcgtgcgggcgcgcattcgcgtcgccgacgacgccgaaatcaccatggaagccaatcccggcaccgtggaggccgatcgcttcagcggctaccagcgcgccggcgtcaaccgcatctccatcggggtgcaaagcttcagcgccgagaagctgaaccgtctggggcgcatccacggcccggaagaagccaaacgcgcggcgacgctggcgaccgatcttggcctgcgcagcttcaacctcgatctgatgcacggcctgccggatcagtcgctggaagaggcgctggacgatctgcgccaggctatcgccctcaatccgccgcatctgtcgtggtatcagctgaccatcgaaccgaacaccctgttcagctcacgcccgccggttttgccggacgacgacgcgctgtgggacatcttcgaacgcggccaccagttgctgagcgccgccggataccagcagtatgaaacctcggcctacgccaaatcaggctaccaatgccagcacaacctcaactactggcgctttggcgactatctggggatcggctgcggcgcgcacggcaaggtgaccttcagcgacgggcgtatcctgcgcaccgccaagaccaagcacccgcgcggctttatgcgcggcgactacatggacaagcagcatgaggtggcggcggcggatcggccgttcgagttcttcatgaaccgcttccgcttgctggaagccgcgccgcgcgccgacttcgtcaactacaccgggctggcggaaagcgtcattcgcccgcagttggacgaggcgctggccaaaggctatctggaagaaaccgcggagcactggcagatcaccgagaagggcaaactgttcctcaactcgctgctggaacagttcctggcggacgacgagtaaaaaaaagcgctgaataatcagcgctttttttcatgttcaggcggcattatgagggcgatgcgtcacgtcgccacgccccttcagcaatccctcaacggaaacatcctcgtccaacgcatcccaatggatgccgcgagcgctgagttcatactctgcccgctgttcttgcgtcgccttcaacaaacgcggaaaccaggccagtggcacgccaataattcgggcgtcgctcagttcgacccacatcgtcgcatcgtcaaagctgacgcgtttagccgaaatactcatgccaagcctccaaaaacaatgcctgataggtatcaaccagacccgccagctcttttagcgttctggcgttaaagccgtcattacgcgccaactgcacgccaggaaccaaccagaatttcgcttcagcctcagcgtctctgatatgaacatgcggcggctcaagcgggtcaccctcgttggaataaaaaaagaacctgtagcctttataacggaatatcactggcatcaatgcaaaatccttttgccgattgattatagtttagccagtttgtcagatagccgtcgtgaggtcaaaaacgcacggcggctacgcctatccgttacttcaacgccttcagcagatccttgcgctgggtttccagtgcggtgacgcggttgcacacatcatggccgaagttctggaagtcctgctcctgattgttccattcgttctggatcgccttctgcaagccgcccaggttgcccatgatcgcctgcagcgggttaccgccgctgttggcggcctgtttgacgcccatttcgttcaggctgtcctgcagcacgccgcccatgctctgctgcacgatgttgcggccgtcctgttccacctggtcgatcgccttgtggtggaaggtcaggccgtcgctgcggtgctcgatgatgcggttcatctgctgtttcagctggccattcagggtggtcagccggttgcgcacgttgctgttgctgcccagctctttgacgatcactttatccagcgctgcgcgggctttctccaggtgtttctgcgcgccgtcgtcgatccacggcagttgcttgcgcagcgcgctctggtaactgaaggctttctgccgctggctgtcgttcaggctcagcgcctggccgttgcggatcacgtcgccatccggcgagatttgcaggtcgccgctggcgcctttcacctgcacgctctgcgggctgatgatcacatcgtcctggggtttaacgctgcattggtactcggcgtgggcctgcgcggcagtcgccgccagcagcagtaaggctaacccggttttcttcaacatagcttctcctgactcccatccagactgggattaaaaaatcgaacgaccgatacgttgagacaacagttccagcgccgcagttcccgccagcgagttgccggaagcatccagctccggcgaccagacgacgatcgacagctcgtccggcacgatggccacgatgccgccgcccacgccggacttgcccggcattcccacccgataggcgaattcgccggcgccgtcgtacatgccgctggtcatcatcagggcgttgatctgccgggcctgcagcgggctaatcaccgcctcgccgctgagatcgcggccgtgattggccagatagacgaagctgcgcgccagctccacgcagctcatgcgcagcgcgcagtaatggaaataggtttgcagcacggtgatgacgtcgttttcgaagttgccgaacgacttcatcagataggcgatggccgcattgcgatcggagtgttcgaattcggaacgcgccacccgcaggtcataggccagatcgtcttcgccggccagctgacgcaccacctccagcatgcgctgtttgggggcgctgagccgggtttgcagcatgtcgcacaccaccagcgcgccggggttgataaacggattgcgcggtttgccctgctccatctccagctgcagcagcgaattgaacggcaggccggaaggctctttgcccacgcgccgccagatctcaggctcctgatagcgcgtcagcgccagcgtcaggctcagcactttggagatcgactggatggagaagcgctccgcggcgtcgccggcctggaacagttcgccgtccaccgtgcacacggcgatcgccaaccggtcggcgggcacttccgccaacgccgggatgtagtcggccactttcccctggccaatcagcgggcgcacctgttgcaggatctcctccagcaacgcgttatccaatgttgttaccacctcggtcacactccgggcaaaacaaaggcgccgttaaggcaccttagatcaataaaacggcgcggcgcgaagccgcactcatcgggcaagcgcgatcaatcccaccagatatcgaacagatcgctgaccttaacgtcggtcagtttgcgcgcttccagccagtttttcaccagttcgcgatgctcgtcggtgcagtggccgatcttctgcaggcagatcagaccttcccactgcaggtagccgctgccgtcaaacgccaggccgttcggctcgatcacttcatcgatgaaggtatccagcgtgctgtcgatgtcttccaccgacgtgccttcggcaaagcgccaggctacggagaaacccagttcctgaaattcttcaatgtgcaactttttacgtaaacgacgactgcggttcttagccattattctttcctctcaaacatcaagtcccaaacgccatgtcccaggcgctggccgcgtaattcaaatttcgtcagcgggcgcgaatccggacgcggcacgtaatcattatcgctggaaagattacggtagcctgcgaccccgttcataacctctaacatatgttccgcatagggttgccaatcggtagccatgtggaagaccccgccggtcttcagcttgcgcagcaccagttcgacaaacggcgtttgcacgatgcggcgcttgttgtggcgcgccttgtgccacggatcggggaagaacagctgcaccatgtccagcgagccgtccgggatcatgttttccagcacttcaaccgcatcgtggcacatcacgcgcaggttgctcagcttcgcctcgtgggcgtcggccaggcaggcgcccacgcccggcgagtgtacttcgatccctaaaaagttctgctgcggattgttgcccgccatagtcaccagcgaggcgcccatgccaaaaccgatctccagtaccgtcggcgcttcgcggccgaacagcgcagcgagatcgacagcgtcagcctgatactccacgcccatcaccggccaatagttctccagcgcgtgctgctggcctttggtcagccgcccctggcggcggacaaaactgcggatacggcgcatcgcgcggccgttctcatcaaattccggggagatgacgtcattaatcatagtgctttctgtctgtttggctgccaattagggaaacgcgcattatgcaaagatacattggtttagcaagtgttcatcttctgtacccgccgtgcggcgtcggaaagttccggtttacagcatcatgactctatgctgcaatctcgcttcattttctgccggataacgacgctgctcatgatgcaagcacaacaattcgcacaggtggtgcttgactggtaccagcgctacggtcgcaagaccctgccgtggcagctggagaaaaccgcctatcaagtatggctctccgaggtgatgttgcaacagactcaggttgccaccgtcattccttattttcagcgctttatggcccgttttcccaacgtgcgcgcgctggcggaggctccgctggacgaagtgctgcatctgtggaccggcctcggttattacgcccgcgcccgcaacctgcacaaggcggcgcagaccattgtcgcacagcacggcggcgagttcccgacaaccttcgcagaaatcgccgatttaccgggcgtcggccgctccaccgccggcgcggtgctgtcgttggcgctgggccaacactatccgatcctcgacggcaacgtgaagcgcgtgctggctcgctgctacgcggtggaaggctggccgggcaagaaagaagtcgaaaaccgactgtggaaaatcagcgaagaggtcaccccggcgcagggcgtcggccagttcaaccaggcgatgatggatctgggcgccatggtctgcactcgttccaagcccaagtgtgaactctgcccgctcaacgtcggctgcctgtcttacgccaatcacagctgggccaactaccccggcaagaaacccaaacagaccctgccggaaaaaaccgcctacttcttattgctgcagcacggcgaccgcgtgtggctggagcagcgcccggcggtgggcctgtggggcggcctgttctgcttcccacagttcagcgcgcgcgtggatttggaactctggctgcagcagcgcggtctgaaaggcaagcgcctggaacagctgaccgcgtttcgccacacgttcagccatttccatctcgatatcgtgccgatgtggctgtcgctcgacgcggcgggcagcggcatggatgagggcgcgggtctctggtataacttagcgcagccgccgtcggtcgggctggcagcgccggtggatcgcctgttgcaacagctggcgaagcagcccccgatccaacaaaacttatatggcgatagcgccatcgacgaggaattagcatgagccgcaccattttttgtactttcctgcagcgcgacgccgagggccaggacttccagctttatcccggcgacgtcggcaagcgcatctacaacgagatctccaaggaagcctggggcgagtggatgaagaagcagaccatgctgatcaacgagaagaagctgaacatgatgaacgtggatgatcgcaaactgctggaagaggaaatgatcaagttcctgttcgaagggcacgacgtgcacatcgaaggctatacgccgccgagcgaataacgctgttggggccaggcgctggcccgcttcaatcctcttatacttcttccaaacggctttaagatgaagaaaattttagctttgctcgtaatagcgcctttgctgatctcctgttccggcaaaaaaagtgaagaaatcaacgaagcctggatcaaagacaccaacggcttcgacattctgatggggcaattcgctcacaacatcgagaacatctggggtctgaacgaagttctgatcgccgggccgaaagactacgtcaaatataccgaccaataccaaacccgcagccacatcaacttcgacaccggtgccatcaccatcgaaaccatcgccaccaccgatccggccgcgcacctgcgccaggcgatcatcagcacgctgctgatgggtgacgatccgggttccatcgatctctattccgacgccaacgatatccagatcagcaaagagccgttcctgtacggccaggtgctggataacaaaggcgcgccgatccgctgggaatggcgcgcggcgcacttcgccgattacctgctgcagaccaagctgcaaaaacgcacctccggcctgcacgtcatctactcggtcaccatccagctggtgccaaaccacctggacaaacgtgcgcacaaatacctgccgatggtgcgcaaggcgtcggaaaaatacggcgtagacgaatcgctgatcctggcaatcatgcagaccgaatcgagcttcaacccctatgcggtgagcggttcggacgcgctgggcctgatgcaggtggtgcagcacaccgccggtaaggatgtgttccagatgcgcggcaaatggggcaccccgagccgcagctacctgttcgatccggagaacaacatcgacaccggcaccgcctacctggcgatcctgcagaacaactacctgggcggcattcagaacccgacctcgcgccgctatgcggtgatcaccgcctacaacggcggcgccggcagcgtgctgcgggtgttctccagcgacaggacgcgcgcggtgggcatcatcaacggcatgcagccgggcgacgtgtaccaaacgctgaccaccaagcacccggccgccgagtcgcgccgctatctggtgaaagtgaataccgcacagaagagctaccgcagaaagtagcgcttcccgcgtggataggagaagggccggtgcgaaccggccctttttttactgcttgatcatatagccaaagatgcgcttccagccgtgatcttttttctcgatgtagaccccctgcagctccggcgagaagcccggcaggcggttgatgccctcttctaacgccaggaagtagcgctgcaccgcgccgccccacacttcgcccggcaccacgcacagcacgcccggcggatacggcagggccccttccgccgcgatgcgcccttccgcctggccgatcggcaccagctcgacgttgtcgcggataaactccacgttggcgtcctgcgggttcatcaccaccggcggaaaatgatcctgacggaacatctccttttgcagctgcttaacgtcaaagctgacgtacagatcgtgcatctcctgacacagccggcgaatgctgtagccgcggtaacgctgctcgttcttgcggtacaccgtcggcagcaccacgctcagcggcgcatcctcttcgacatagcgttcgaactgcgccagcatctccaccagctgttccatcttggccgggttctccgccggggtcagcaggaacaggatcgagttgagatcgcacttctccggcacgatgccgttctcgcgcaggaagttggccagaatggtggccggcacgccgaactcggtgtattggccggtcgcggcgtcaatccccggcgtggtcagcagcagcttgcacggatccaccagatactgatcctgggcatagccttcgaagccgtgccacgtctcccccggcacgaaggtgaagaagcgcgcgtcgttggcgatcagatcggtatcgtgatcctgccagtctttgcccgccacctgctgcggaataaacggcttcagctgcgagcagcgcgtgagcagctgtttgcgcgtctcgatgcccagcttgacgcagtccatccacatgcggcgcccggcggggccggcgtgcatcttggcgttgacgtccagcgcggcgaacagcggatagaacgggctggtcgacgcatgcagcatgaacgcgttgttcaggtgcttgtggttgcagtggcgcttttgccctttgatatggtcgtctttcttatggatctgcgaggtctgcgagaaccctgcctgctgtttatgcaccgactgggtgacgaaaatgcccggatcgtgctcgtccagctccagcagcagcggcgagcactctttcagcatcggaataaagccttcgtaacccacccaggcggagtcgaacagaatgtaatcgcacaggtggccgatggtgtcgatcacctggcgagcgttgtaaatcgtgccgtcgtaagtgccgagctgaatgatcgccagccgaaacggccgcgccgccgcggctttctccggcgccacctcgcggatctgctcacgcagatagcgttcgtcgaagcagtgcgcatcgatgccgccgataaagccgaacgggttgcgggcggtttccagatagatcggcgtggcgccggcctggatcagcgccccatggtggttggatttgtggttgttgcgatcgaacagcaccagatcgccgcgggtcagcagcgcgttggtcaccaccttgttggccgccgaggtgccgttgagcacgaagtaggttttatcggcgttgaacacccgcgccgcgtgtttttgcgcatccttggccgagccttcgtggatcagcaaatcgcccagcttgacatcggcgttgcacatatcggaacggaacagggtctcgccgtagaaatcgaaaaactgccggccggccgggtgtttgcggaagaactcgccgccctgatgccccgggcaggcgaaggttgagttttccatctcgacgtaggtcttcagcgttttgaagaacggcggcagcagcgcctgctcgtaggcgtcggcggcggcctccagctgcgccatgtagaacggcttgctggcgccggccagcagcgcaaaaaccccactgacaaacggcagatagtccggcgagagatgctcgtccccttccaccgccacgaaggtcggaatgtcgaaccccgtcgcctgcaagcgcgccagaatgcctgcgttcacgtcggcgaccgacaccaccgccgccgccacgtcggtgtagtccgtctgctctacgcgcacgatctggcgcagcgtctcaatggtggcgaccaggctggcgctggtcgcgattttcaattctttcatcatgctgactctcaaacggtgaaggatgagggtgtgccaccggcacggtaatgagataacgcggttatcccggtaaaagcgatacccgggcacggcagcataagcggcgtgcgtgaccggctcatgatcggggatcatcaggcggctatcgggggaactggtcttggcagcgtccgacaggcatcagtaaaatcagggccgcagcgctggctttacgcatgcctaacagcgagcgtcaggcggccttaccgcatggccggcaggcgtattcgggcggatgacgtgcggaggaaacaacggcggaacggtggcggcgtcagatgtctggtgcgcagcagcgcttgagcaacaaaaccagtcatgccaataaccctctggcttataagaagcggaaacaccgtcagggaacggagagtgctaaaatttgcgcaatgattgcatgattcgttgcagggttcaagcgagaatcgccttgattgaacgtccattgattaaagcataattcattgttatttaattgaaaaaccaaaaatcgcgcgttttaagatggtataaatacacgttttatatgcatatttattgaatgcggatatccccccgtcccccgtccctccgggcttactgcctgaaaatagagcaaccgatcggctttgtgacagaaagcgattgacgccatccggccaatacggtttaatgcgccccgttgcccggatagctcagtcggtagagcaggggattgaaaatccccgtgtccttggttcgattccgagtccgggcaccatattcagaagaacccgcctatggcgggtttttcgctttctgggatacggactctccatcgaactgcgttcgattattcggcctaaaggcctcaccctgcgggccagcgctgaagcgctgttcaacgcggcgccagcgccggttgtccgagtccgggcaccctattcagaataacccgcctatggcgggtttttcgctttctgagatacggactctccatcgaactgcgttcgattattcgatcttacggcctcaccctgcgcgccagcgctaaagcgccaccgcatcatccgatggatgtgcaatttcgcattacaggtgcactttctcaaaaggcccacccccaatcctccaggcgtcaaacgagcgcactcatattctccgtttatcgagtgttttttattgtcattcggtgatggaatatagccacgaacctctaacggtatcactttgttaaataaaaacatattggattaaaactaggaacattccgaataaaaacgacattgctgttaattcattcatataaggctatgctgagttttacctattgataagacatttttaacctattccgctgccaacgcgaaataatggaggatccggcgacaatggcaattgatatgtatatgaaagttgaaggaatgacgggcgagtcccaagacagcaatcataaaggatggaccgacgtactttcgtttaactggggcgcttcacagccaggaaatatggctgtcggcggtgggggcggttccgggaaagtgaattatcaagacctccgtattcaagcgcttatcgacaaatctacacccgccattcttaaatattgttccagtggaaaacatgtcgcgaaaatcgagctttccgtatgcaaagcgggcggcaaccaggtggaatattccaaaatcgttctcgaagacgtgctggtgacgcaaaccgattttaatggtgtcggtcaaaatgatgcgatcctggttgattacgccttccaggcgtcaaaagtcaccatgagttactgggaacaaggcagcagcggcactaaaggcgcggaaagcaaatctggttgggatatcaagcagaataaagagagctaagtgcattctggcacctaacaatacgttaatgatcgggtgataaaatcatggcaatggatatgtttttaaaagttgaaggcattaatggcgaatcgaaaaatgcgaatcacaagcaatggatcgatgtcttttcctttaactggggcgcgcggcagcctggcaatatggccgttggcggcggcggcggtacgggtaaagtgaattttcgcgatctgaccgtacaggctctgatagataaagcgacacctgccttattgaaatactgttcggccggtaaacacctcgccaaggtgcagttgtcgctttgcaaagccggtgggcaggaagtggaatatacccgcattactctggaagatgtattagtgactcataccgacttcatcggtgtcgagcacggttccacgctaggcattgaatactcttttcaggccggtaaagtatcgatggaatactgggagcaagcgaagcaaggcaataaaggagcttcggtgcagatgggctgggacattaagcaaaataaagaaagctaatcacattacggtgcatatcgtaatggcggggggattatggcatttcctaagtcacatgaaattttagctctgacatcgcaacacgaatcgaataatcgggtgtcagccaactttttgacccgtgagattttgaatgaggcgctgatcctcgtcaggtctctgtcaccagaagaagtctttcgattaacaaaaacggagaccggccagatcgcgtttacgctgggtgaactcaaagatgaaaacaaccgccgattgacagccaataatattgagtcaggacaacgaccaggtggaagaattaatcacctggataaccgcattaatgtctcttttcccggaacctcatggcaaatgggagcgcgtgttcagcattttgagaatatcgcgtcgagtaccgtcggcggagccggtctggttttgatcgcgggattatggacgggggccggttctggcgttggcagcattttaggcagaaatgccgcccagctcgcggtagtgactggcacgtatttgggtaaacgcttcgtgaccaataaaaccatggtcgtgaatcagatggcggcgcatatcaaaaaccttgccgatatgtttaactccacccacaacgcctttaatgatttcaagttcgaaagcgcagccaagcgcgcacaatacagtcccgatcctcaggcagagcaccctattacttttgaacagaaagtcacggataacaatgcagttcctgctaatcataccgatgccattcaggctatcgtgcgccgttttgtgacgggaacttaccaacgtgtagatatcgtcggccagggcgatatgtttataaaagtctttttcagcgatggggaactggacatttcgcaagcccagtatgactacctcagcaatttgaagctcccgtgattgatcaacctggcaggtcttcgcggttctggcgcaacggttgtcattctgtccagggtgcaaaaatgccccgaactgacggaaagatttttattgtcggtaagaatggtcaatgacgatgacaaggcagactgccggatcggacgcgatcgttgcgccagcgtggccagttttttcacactcggctcgagcaagcgccctctccgggcagtctttgtccggcattaattaaacgaaccctacccccggtagttaacgcgaaccctccgcgtccatagggtgcaactcggggtaaaatattgccgttcggggggcaacaagaggagataaaggtacagaagtgtgcgtatcaccttagtggaaaagtgtgatgccctgccgcaaaaaaaaataaagcattgaattaaatgataaaaattaacttacaacgcacggatttcataatttcacttccgatttcatctttgcaaaaagcatcctgcctctaatatcacgttatttcaccttccccgcgcctattttaaggctattctaagcaacgaatacaccgagcccggcgtgcaatggcatatacatcagaaaagcagataagaactcatacggtgggcatcctccctggtggccgttttcatggcttgatgaatcagggggacatcggaattttacttaggaatattcattaaatacacgcgcaaaccttcatagggattttcatggaaagaaatacgcccgtagcctttgcctgatgcgctacctaatgctaaacgggcatttaaaattgcggtatttttggcccgtacaccttttaattacatttaattcgtgaagcttacttataagaaaaaggcagcctggttgctataagccaccctatctgcagtcgtatttctgggtattattctcattatactggagcttattaatgaatcagcgtttggatatcatcggtattggccttggcccgtcgaatcttagcctggcagccttaggaagtgaaatagagggatttacgggacagttccttgagcgcaaacctcatttctcctggcatccagggatgatcctggcggattgcagcatgcagaccaactttttaaaagatttagtgagcgcggttgccccaaccaatcgctacagctttctcaactatctggtaaaaaacagaaaattttatcgtttcctgacgacggagcagcgcaccgcatcgcgcgaagagttcgccgattacctcacctgggccgccgccgggatgggatcattggcattcaatcaagacgttcagcgggtcgaatttgacgatcggcagcgccagtttgtggtgaccacctcgaataaggtcttccacgccaaacacgtcagcattggcataggcaagaaaataaagttgccggattgcgtgacgacgcaaagcgatcgctgtttccatgccagcgaaatgatgctgcgcaaccccgatctgaccggcaaacgcgtggcgatcgtcggcggcggccagagcggcgcagatctgttcctgaatatttttaaaggggaatgggggcagccggcgcagctcgactggatatcgcgccgcaataactacaatgcgctcgatgaggctgcttttgccaacgaatacttcacgcccgattacgtcgagagcttttactcactggacagcgcggccaagcggcatatgctggccgaacagaagatgacctcagatggcatcaccagtgagtcgctgctggcgatttatcgcgccatgtaccaccgcttcgacgtcctgcgcgagaaattatgggtgcgcctgctgcccagccgttcgctgacggccgtgaaacacacgctggataacgcctaccaactcgaaacgcgtcatcatctcgatcacggccaggaaaccttcaaggcggacgtggtgatctttgccaccggttatcaatcggcgacgcctgagttccttgagcctttggcccaccggttgttaaagactgcggacggtgaataccgcatagccccagactttacctttgagtgggaaggcccagcggagaactgcttatttgcgatgaacgccagtatgcataatcacggcattgccgatcctcagctgagcctgatggcctggcgatcggcccgcattcttaatcgggcgttagaccacaagccatttgatctgggaacaacgccgacagccattcaatggcgcagtgaaagcgtaccgcccgcgttttaaatacaagaacgtcttaatcattgtcactatgctttgatggaattacgtatatgaagagacaattcaagaagtttattctgaatcagctggccgtattagcccccgagttcaaggcccgattgatatacaaaagggcatttggcaaaccgctgaatttacagtcgccctcaacctggaatgaaaaaataaatcatcttaagttgaatgactacagtaataacgcattagtgactcaatgtgcagataaatatgcggtgagagagtacatcaaagaaaagggatgcgaagagattcttaatgagttgtatttttcctgtgattcagtgcaggaaataccgtgggaaacgctgcctgataaatttgtcattaagggaaaccacggttcagggtataatttaatttgccaaaataaacaatcgttgaacattaaaagcgcctctcatctgatcgatggatggatgaaagacgattactggaaaacctatgtagaactcaactacaaagggatacaaaaaaagatcattggggaaaagtatatcgaatcgaccaatggtcacgggcctgaagactataaaatctattgtttccgcggtgtgccttactgcaccttgctgtgcgtcggcagggataccgggacgccaaaatattacttcttcgacaaagagttcaagttcctttgctatagcgaagactgtctggcattgagccaggaggagatagacgctttcgtgaaacctgagggatatgatgagctgtttgagtacgccactcgcttgtcggcgccctttgagtttgttcgcgttgatttctacatctcgcaaggccagatcatttttggcgagctaacctttaccccctccgccggattggatacggatattttgccgccgaccgatattttgcttggcaagatgctgacgctgcagcagcactgattttcaccggacgcccacagggaagatcgggcggcgcagtgcccagcgcgagaggaataccggccgacatgttcgcaacctgccggccggtattgccctgaaggtatcgggcccatgatctcgcttgttcataccgccgttacagaaaaaccccgccacctatccctgatagcccgcaaccggcccaggcgcaataccttagccggaccacataaccatttgaaaaataatggcattaaatgatcaataagaatcacttacatatttataataaaatgttctatatgtataggaagctataatataagataccggaaagtttccctggtgttgttgtgtgtctttgccctattttatagggctttttttgctaaaaatcgttgataaccgtgtatttcccccgctattcgccattcccctccccataaaaaccataaccatttctaattaattgcaatctctcttattcctgacttaccaataataacaatgagttgctattaacccggcaaagcaactggcggccctcttccgggttttggccgccattcgcggccggaatgtccgccctaaaggtaggtttttgccgggcgcgaacggatgctactatcggccttttgccgaaggtgttaacccgcatgtttttgtccaaccggcattttatctctgcgcttctggcgctcgccatcggcttttggctgccgggttccgtgctggccaggcccgatttggaacgcaagatcggcactaccgtagccgatagcgattctgcggattaccgcttcagcgacctgcgcttcacctccgccgatggccgacggcattaccgcgttcgcatcgcccaaccgcatcgggtacctgagccgggcggctatccaacggtttatttcctcgacggcaacgcggtgctgatggagttaaacgccgccttactggccaaattggcagcggcgaagcggccgccggtgctggtcatgatcggctatgacaacgatctgcgcatcgatgccgccggccgcgcctacgactatacgctccctctgccggcaggcatgaagacaccgccgcgggccggcgggggcgcggatgcgttcctgcaattgattgaaactcggatcaaaccggcgatcgccgccagactggcggtcgatccgcagcggcagacgctgtgggggcactcctacggcgggctcttcgttctgcacacgttgtttacccatcctgccgcctttcagcgctatatcgccgtggaaccctcgctgtggtggggcaacggcatgatcctgcaagaagcgcagcagatgacggaacggcgcgcggcgccggcgataaggctgcaactgtgggttggcctggcggaacgcgatcgcgcggccccgcccggtgtaaagagccccgctctgccggcggacgcaacgcatttgctggccgaacagctggcgcagctcgacggtttcaccgtcggctatcgggaatggcccgccttagggcacggcgccatgctgggcgcgaccatcgagccggcgctgggcagcgtcatcgcagaagactgaattcgcggctcagaaggcatcggccacattttcatctgcagcgcatatcttctgataagaagagtgtttaatatctgagacagagaacggtggccgcgggcgggcgcgtcaaaaaacaaagtggctcccccgtcggcaagtgagcttgctctatccggtggagccatacagtactgcagttttcccggtggggccctggtgaggcgcaagtaggaaaagatggtgtaagcagggcatttcagcgttttaataccgcctgtttcactattttcttctccctgtggcgcctatcataagcgcccgttcaccaggcggaaaagggtgaaaaccacccttgaaatacattaacgaaagtgatattagaagcggttggggcgaaagcgcctagttcagttttgaataattaaatcagggaattatattaaaaatgaatattaatatcaccgacaaacccaacccgcaggatgaagagttcgttatcgacagcctttgggcgcacaatcacaaaacccagcccgtagacattcacccgctgttcctgaccgttaccgacgacaaccagcagatcgtcggcggcctggtcgcgcgcacctggtggggcggcctggaagtgcaatatctgtgggttggcgatcaatgccgcaaaagcgggtatggccgccaattgatggagttggccgaagaagaagcccgcaagcgcggttgccatatggcctatgtcgataccttcgatttccaggccagaggcttctacgaaaaattgggctaccgggtctacggcgagctgggcgactatgcgcatcgccacacccgccattatctggctaaaagcctgtaacgcggcctgagcggcacagaggtgggtatgggttcatcacataaaaataatgaatcttattttaagggcctcatcaccatgatggagcacctgagcgaaccctggggcatcaaagaccacctgtcccgccacctctatatgaaccgcgccgcttatctctataccaatacgccgctgaatttcgacgtcgccggcaaatatgaccacgagttccccgccgactgggccgactccgccgccgactttatcgagcatgacaaaatgaccgaagcggcgcgcgatcgggtcacggtcatagaaacgcactactggtacggcaaagacagcctgacgccgtttatcagcgaaaagctgccggtgtacaacgatgacaaacaggtgattggcgtgatctggaacgccaagccgatgaacagcctgtcaccgctgaagtacatcaatcagcaaaaacccagcgtgttgaccaccgaagtcaataacgagctgttcacccgtgccgaactcgatgttattttccttatgctgcaacgatttacggtgaaagagatcgccaaaatctataatgtcagcaataagaccatcgaaaaccgcatttataacatttaccagaaggccaacgtgcatactcagcagcaatttgaggaatactgcaaatacgccaatctggataactacattcccgatcgcctgataaccaaaggcattcagtttatttgaaccgcaaggaagatctcaccgtgataaagatcgaagattatccgctcacccgggtgccgcaggataaacgagtttcgtttttaagcgtggccatcgtgcatatgggcatgctgaccgcactggaccagttcatgctcggcgccgtactcggcaattccatgacgctgattgacgccttcaccgccatcttcgtcggcagcctgatcttcggcgtggtgacctacggcctggggctggcgggcatgcgcgaaggcatttccggcagcctgctggcgcgctggtgcggcttcggccgtctgggctcggtgctgataggcgtggtggttgccgtcagcctgctgggttggttcggcattcagaacgccattttcgccaagtcgctcgacttcgcgctcggcaataagctgggcttcggcctggccgccgggctctcgggcacgctattgaccatcctggtggcattcggcttcaaggcgctgcgcatcgccgcccgtatcgcggtgccgatgttcatcatgctggtggcctatatttcggtgaccgcgctttccggccataacctgcaggagatcatccagctggcgccgccgggtgaaccgctgaccatcagcgccggcatcaccatcgtcgtcggcggcgccatcgtggccagcctgatgacccccgatctgacccgttactccaaaaacggcaagcacgtgctcggcgtcacgctcttcaccattatcgccggcgagttcgtggtgaacggcctggcgatcctgatcgccaaaaccctgggcaccgcggatgtggtcaccatcatgtcgcaagcggccggcggcgccggtttgctggtggtggtgttctccaccctgcgcgtcaacgatctcaacctgtactcttcttcactgggcatcgtcaatgcggtggaaggcatcaccggcaagaagctgaagtacacctacactacgctggtgatcggtattctgggcaccaccctgtcggtgctgggcattcttgaccgctttgtcgactttctgacggtgcttggcgtggtcttcccgccgattatcggcatcatgctggtggactattatctgctgcgcagccatcgcaagatcctggatgagagccgccggaccggccagctgccgaacgaaacgccaactatcggctgggcggcgatcgtcgccagcatcgccggcggcgccgttggcctggcaaccgaatggggcgtaccgaccatcaattccctggtcgctgccagcctgctgtattggctgcttaaactggtcttcagccgggcgcaaaaaccgctggcatcacagaaatcgctctgattttcgtgaacgcggtaatgcactcctccgataacgggggagtgttagacgctcgaaaaggggattcaatgcaaaagaatgagccgatcgcgcagacaaacggccatggtgattagggtccctggtgtcggtagcaagctatccattatgctcagagtgtggcaacgccccctctgagctttttattataaaaactgtcggcttccgtgttttgatcgtaaagagaaacttcagcttgcatgaacagtagcccatgaaatcggctttggtcaacataaaagtaaacataaaaccggcttttgtgttcacttttccataagaaaaacctaatcaattgatttgcacggctttatctttcgcgcagaggaatcagaccgcctccgctgatatcattgcgctaaacggctgacggaaaacaataattactgctaataatcagttcgttacctgctcgcctgcgcctttttatctggacaacgccactgcgtaagatatagtgaagcctgcgtaatgtttgtaaggacagccaatgaaaaccaccaacgcacagcgcaaaatcaacatcattaaaaatattgaatatctgatgcgtacccgcggtgaaaccaaggcttccttttccaatcgcagcggcctgacgcgtacgactctctacaaaattcttgacggaagagtgaacaacgttcagcaatccaccgtgaataggatctccgatttcttcggtgtctcctgtgaagagatcgaagattacgatctggaaaagctggagctgcttaacgaaacgctgtccaccgaaggcaacaagaacccttccgccattccggtaatcccgcagtcgcgctatctggccgtctcgcagcgcaagatcgggcaactggtcactgagttccctttgacttatttcttcggcgatgagtcgaacatgttggcaatgaaaatagagaccgaaattaaagggtcatttattcccggcgaagtcatcatcatcaaacgcccgccggtactgatttgcgattcgcctttgctgtatcactcgggaaaaagcggcttctttgtggttgacgacaaagacagcgaaagcatggacaaacgccctcaggacaccgtgcaattcctgggttacatcgttggagaaaggctataaatggaaccgaatcagaagttcaagctgttgggcttcacccggcatggcaccatcgcggccaatgtcatggtattggccaccggcaaaaccatcaccatggggctgaatgagctggccgacagcgaaatatcagaagatttaagccggcatgagctgcaggcgctgtaccgtaaactctatggtgacaaccaacaaaaaaccgcctacgagctcagcgatcgccatgaacgatcctggtacgcctacctgattattaccgtggcgctcagcgtgatttatattttctcaacgctgtgcggcgtcaagccgatccaaatcccggtgctgaatctcatcacgccgccggcgatcttcatttacccgctcacgttcattctggtggatatcctcaacgaattctatggcttacgtctggccaggcgcaccatcatcatctcgtttatcgccaatctgaccttcgtcctgggcgtttgggtaacgacgctggtgccgagcattccgcagtgggagtacagcgagacctacaacggcatcgtgcacagcatcatggcggtgctggtggcctcgtcggcggcctatctgatctccgaaaacgtcaactcctacctgctctgcaaaatcaaagagttgaccaattcccgctacctgtttgtgcgcgtgatcaccagcaccgtagtggcttcggccatcgacagcgtggtgttctgtacgctggcgttctacaacgtgctgagctgggacatcatcaaaaccatgatcctgtcgcagttcctgatcaaggtggtttacgccctgctgggcgtcgggccgatctacgccacccgcagtctgtttaatcgctacatcaataccgaacaagcaaagggcaatgaatatgcatatccaaaagcaagataaaatcacccatcttggcgcgaactccgattatccggatcaatatgctcccgcattgctcgaagccttgccgcgtgcccgcggccgcgatctgatcggcgtggacgagcggcagctgccgttcagcggctttgatctgtggaccgccttcgagctgtcctggctcaacggcaagggcaaaccggtggtgggcatcggcgaatttaccttcccgcactcttcttccaacctgatcgaatccaaatcgttcaagctgtatctcaacagcttcaaccaaacgcgcttcgacagcgtggaacaggtgagcgccgccatgcagaaggatctgtcgcaggcggccaatggccaggtcaccgtcaagctctatccgggtctggaaggttatccggcgcaaatcgatcgcctgccgggcatcaacatcgacgatctggatatcgcggtcgacgacttcgccttcaaaccggaatacctgagcggcgcggccgagagaggggaatcggtgtcggagacgctgtcttccaatctgttgaaatccaactgcctggtcaccaatcagccggactggggcagcgtggtgatccactatgaaggccgccaaatcgatcgcgaaagcctgctgcgctacctgatctccttccgccagcacaatgaattccacgagcagtgcgtcgagcgcattttcaacgacatcaagcagagctgccgcccggaaaaactcagcgtgttcgcgcgttacacccgccgcggcggcctggacatcaaccccttccgcagcgatttcgaaacggcgccgacgctcggccgcctgatcagacagtaagcctcatccccaatgctcccgccagggagcattgtttctctcgctttcatctccctgttatttttcgccattatcgtcgtcagcggctatcttcaaagcacactgacggagattaacgacgcatgcctgacctttctcgcagagacatcctgcgggctgccgccatcggatcggcgttctcgctgttgcccgcctcgattcgcaaagcgctggccattcccgccaataaccgcaccggtaccctgcgcgacgtcgaacacgtggtgatcctgatgcaggagaaccgctctttcgaccactacttcggcaccttgccgggcgtgcgcggcttcagcgatcgctttaccattccactgcccggcgatcgcctggtctggcagcaacagggcgccgaacggctggtgctgccctaccatctggacagcaaacgcggcaacgcccagcgcgtcaccggcacgccgcactcgtgggtggatgagcaagccgcctgggatcacggccgcatgagcgcctggcccacctacaaaacgccggcctcgatgggctactaccgccagcgggagctgccgttccagtttgcgctggccaacgctttcaccctgtgcgatgcctatcactgctccatccacgccggcaccaacaccaaccggctgttccactggaccggcaccaacggcccatccgccgccgacgtggcggtggtggtcaacgaatgggacagccccggtccggcggaccgcggctaccagtggacaacctatccggaacggctggaggcgagcggcgtcagctggaaggtatatcaattcctgccggacaattttaccgacaacccgctggcgggttttcgccaataccgcgccgccagcattcaggtgggcaacccggcgtggccgccgaaagacttcaacgctttcgtgccttatagcgatgcgctcaacgaggccgcaccgctgtacaaaggcaacggcaacaccctgccggccgccgacggcaacgatctggacgccatgctggccggattccgcgccgacgtgcagcagggcaaactgccgcaggtcagttggatcatcgcgccggcggcctattcggaacaccccgatccctccagcccggtacagggcggctggttcacccaagagatcctcaacgcgctgaccaacaacccggaggtgtggagtaaaaccgttctgctggtcaactacgacgaaaacgacggcttttttgaccatatgccttcgccttccgcgccgtcgctgcgcgaagacggcagcttcgccggtaaatcgacggtgccgttcgacaccgagatcttccagcacgtggcgccacccggttcgcaggatcaaccgccgccggacggccgcatctacggccctggcccgcgggtgccgatgctggtgctgtcgccctggagccgcggcggctgggtcaattcgcaggttttcgatcacacctcggtgctgcaatttttggaaaagcgctttcaggtgcatgaacccaacatcagcgcctggcgccgcgcggtgtgcggcgatctcacttcggcgttcaactttgtcgatcctaacggcgaagcgctgccgagcctgcccgccaccagccgccacgccgccgacggcctgcgccagcgtcaggaacagctgccgcaagtgccgctgccatcgcccgcccaccagcgtttaccccaccaacgccgcctggcacgcccttcccgcgcgttgccctaccagctgcacgtcgaggccggcgtcgcggccgagcaacgccgcgtgacgctgaacctgttcaataccggcgagcagggagcggtgtttcacgtctacgaccggcgcgatctggcgcagatcccgcgccgttttaccgtcgaggcgggcaaggcggtcagcgacgactggcaaacggagaatgagtaccatctgtggctgcttggccccaacggctttcatcgtgagttgcgcggtgccctgagccggccgcagccggaggtgcgtttgcgcccgacgggccgcaacctgctgctgcagttgaataacccggcccccgaagcgataacggtcaccctcgaacgctgcccttacacgcagcaaggcccgtggcctatcacgctgcctgcgggcggcagccatcagcaagcgtttgacgcccgcgccagcggcggttggtacgatattacgctgcaaagcgccgggggctggctgcgtcgcctggcggggcggctggaagatggcgaacacagcgtcagcgacccgctgatgggccatgaataactatcggcatcgagggagttcaaaaatcgaaaggatatcgcttatcattgcgctctcgttcttcgccgattacccaaggatcttcatgcccgctgttcttatcgccaaagccggccgctggttggccgcctgcgttttactgttggccggcgccgctcaagccgcgccgatcgtcgtcaccgatgtcgccggccgccaggttacgctgccgcaaccggccaagcgcgttatcctggccgacgcccgcgcgctgttggcgctgaatattctgcatccgcaggagccgctgaaaaacatcatcgcctgggacaactcgctgaaggtcaaagcgccggatctggttgaagcctacgcaaaaaaattcccacaggtcatgcagatccccaccttcgacaatccctacaccagtgacttcagcgtggaaagcgcggtggtgcgtcaaccggatctgatcattttcgacatcggtctgctgagcaaattgaaggacagtggcgtactgacccagctggaaaaagtcggtattccggtgctgatcatcgattttcgccagcagccgttgaccaacaccgtcgccagcatgcagctgctgggtaaagtgtttgatgaacagcccaacgccgacgccttcatccgtctctatcagcaacggctcgacttggtgcgccaacgggtcgccacgctgaaaccggagcagcgccccagcgtcttcatcgagcgcagcgccggcatcaaaggcgaacagtgctgcaacaccttcggcaaaggcagcttcgggcagttcatcgataccgccggcggcaataatatcggcagcacgctgttttcagacatgggcggtgaagtgaacgtcgaacaggtgatcagcagcaacccggatttctatctgctgaccggcgccgactggagccgcggccatcgcggcacgctggcggtgccgctgggttacgccaccgatatggccaccagccaaaagaaactggcgcacctgctggatcgcaccggcattaacgtgctgaaagcggtgaaagaaaaacgcgtgatggcgatttaccatcaattttacgacacgccgctcaactttatcgcggttgaggcgatcgccaagttcctgcacccggcgctgtttaaagatattgatccgcaagcggatatcgaaatggtgcaccggaaattcaccgcgctggattacagcggcgtcttctggcttacgccgcaataacccccgccagggcccgccagccgggccctgtttcccgcattcattatttagttacccgcttaactatcccgtaacaattctatttacttgccaataattatcattaagattgtcttttctaaaaaaacacatccgggtctgaaactcttaaggcattattatgtcacctctttttcggctttctctgctgacggcttccatcgccgtcgcattccctgtccttgctactgataactcatctcagaacgataccgacaccgtgaccgtcgtcggcaactggctggacaaccccgataccagttcggtgctgctcaaccatccgggcgcgcgttccatcgtcacccagcagcaaatgcacgaacagggcgaccaaaccatcgccgatagcctgcgcggcgtacccggcgtgcaagtgcgcgacagcaacggcaccggcggcagtgacatctcgcttaacgtcggtgtgcgcggcctgacttcgcgtctttctccacgctccaccattctgatggacggcgtcccgctggcggtcgcgccttacggccagccgcagctgtcgatggccccgctgtctatcggtaatctgcaatcggtggacgtggtgcgcggcggcggcgcggtgcgctacgggccgcagaacgtcggcggcgtgatcaacttcgttacccgtgacattcccaaaacgtttggcggcaccgccagcgtacaaacccagggcgccagccacggcggcctgaagaccctgaccagcgcctccgtgggcggcaccgcagacaacggcctcggtgccgaactgctctactccgggctgcacggccagggttaccgcgacaacaacgacaacaccgacatcgacgatttcatgttgaaaacgcgttatgcgttcaccgatcgtgacgagctgctggccaatttccactactacgatgccaaagccggcatgccgggcgggctgagcaccgcgcaatacgcgcaaaacccgttccaatccacgcggccgtgggaccagttcgaaggccgccgcaaggatatgtcgttcaagtacaaacatcaggaagacgacaaacagttcgaagtgttgacctacttcaccgacagctaccgcggcagcaacatcgaatcggaaggcacaggcaaaaacgcgggccagcggcgcatggtctcctatccgcgccactattcaacctgggctatcgaaccaagttattcgcaggtcttccgtttctgggatatggcgcacgagatcaccctcggttaccgctatctgaatgaaaccatggatgaaaaggcgtcgcgttcggcctggtataacccggcgaatatcggctcgacgccggagaccccggattattaccagcacacctccggcggcaccgcggccaacgcgttctatatcgacgacaccattaacgtcggcaactggacggtcacgccgggcctgcgttatgaaagcatccgtacccacgtggacgattcgttcaacaacatcagccgcaagaaaagctacagcgagccgctgccgtcattgaacgtgatgtaccacctgtccgacgcctggaaactgttcgccaacgccaacacttctttcggcagcatgcagtatttccaactgaccaaaggcggcaacggcaaccagccggcgccggggctaacggcggaaaaagcgcacacctatgaattcggcacccgctacgacgacaccgtagtcaaggccgaggccacgctgttctacatcgatttcgataaccagctgcagtacatcagcaacgacgtgggctggaccaacatgggtgccaccaagcacaaaggcatcgagctggcactcagctacgatctcagcgaactgaatcgcgcgctcgacggcgccagcgtctacaccagctatacctacaccaaggccagcaccgacaagggcgacttcgccggtaaagatctgccgttctactcgcgccaggtctataccgtcggtacacgttacgccaccggcagctgggtatggaatctggacggttatgcgcagtcgaaacagcattcgccgggcaccgggccggagtacatcacgcaggaaagcgccgatggccagttcggcaatatcgccggttacatggtgtggaatatgcgcggggaatataacttcgggccgcagctgtcgaacctgacgctgggtgccggggtgaaaaacctgttcgatcagcgctacttcacccgctccaacgacaacaacttcggcaagtacgtcggcgaaccgcgcaccttcttcgtgcaggggtcaatcgccttctaatgccggggcccggcagggcctcggtatcaccgacagtaaaggcgaaacaggcgcgccaggtgcgcgcccatcggcgtcagggtggtgtccttgcgttggataagataaaacgtcgctttcggcagacgctcttccagctcgagcggcaccaaatgcttgcccaaaatcggatccgaaatcacgtccaccgacagaatgctgacaaaatcgctctgcgccaccaggctggtacaggccataaaggtctcgcacgtcacgctgatcgacggcgccatgcccaagtccccaaacagatcgtgcaatagccgatagtaactgcctttcggcgtcggcatggtccagtcgcagtgctgcagctgtttcagcgaggtcgccccctccatcggatgccctttgcgcaccaccacccgatactctttttccatcagccgttcatactgcagctcgttgtcgaggctgctgggataataggtattgacggtaaaatccagctcgccctggcgcagttctgggatcatcgacaccagttgcccctcgacgatgcgcaccttcacgttggggtactcacggtgaaactgggtgaccacctgcggcatcaccgtgcgcgcaatgctgccgccaacgccgatattcaccgtgccgcccgccaaccccagccgctgctgaatgtcttcctgcgccacccgcagctcttcgaggatcaggctggcatgctggaaaaagttatcgccgcagtcggtcaataccaccccctggctacggcgaataaacagcttggcgcccagcacctcttccagctcctgaatggccttggtcagcgcaggctgggaaaggcgagaggtgcggctggcggcgcggatgctgccctggcggctaacgtccacaaatgcacgcaattggtgcaattttatcgaggctggcataggcgaaaggcgataaccgttgtttatcaatagcaagatattggcatcttatttagccagattccattgtgtacattcggaaaaaacataataaataaccaaattcttatttcgcttaattaagcgcattttctgcgccaataagcgccattcacggcagttagtaaccaaacgcacctttttctttgcaatagcttcaccgtctgatttcagttcagagcataactgctgcctggagcgatccagcgcgcgataacttatgagatatcactatgactaattcgctttcgatgttggtggctgatttgtacccgcaattgcaggcctggcgccgcgacttccaccgctatgccgaatccggctggtttgagttccgcaccgccaccctggtggcggaagaactcgatcggctgggctatcgcctgcagctgggccgcgaggtcatcaaggcagaggcgcgcatggggctgccctcgcccgccgagctggaagcgcaggaacagcgcgcccgcaatcagggggcgttggagaaatggctgccgcatttttccggcggcttcgccggcatcgtcgcaacgctcgataccggccgccccggcccgactatcgcttatcgcgtggatatggacgccctcgatctcaacgaattgctggaacccgaacatctgccgttccgcgaagggttcgcctcttgcaacagcggcatgatgcatgcatgcggtcatgacggccataccaccatcggcctggggctggcgcacgtgttcaaaagcctggaatcccagcttcgcggcaccgtcaaactgatcttccagccggcggaagaaggcacacgcggcgcaaaatcgatggtggaggccggcgtggtggacgacgtcgatttcttcaccgcggtgcatatcggcaccggcgtgccggccggcgagctggtgtgcggcagcgacagctttatggccaccagcaagctggacgttactttccgcggcgtcgcctcccacgccggcgccaagccggaagacggccgcaacgcgctgctggcagcggcgcaggctgcgctggggctttacgccatcccgcgccacagcgaaggcagctcgcgcatcaatgtcggcgtgctgcaggccggcaccggccgcaacgtgatcgccgatcgggcgtttatgaaggtggagacgcgcggcgccaccaatgagatcaacgcgtttgtctatcaacaggcgctgaacgccatcgaaggcgccgccaaaatgcacggcgtcgtctgcgatatcgcgctgatgggcgcggcgcagagcagcaaaccaacccaaccgtgggtggattacatccgccgccaggcgcagcagataaccgagctggcctcggtggtcgatcgccgcgaacaggctgcgggttccgaggacgccacctacatgatggaacgggtgaaatcccgcggcggccaggcctcatacgtcattttcggcaccgagctgagcgccgggcaccataacgagaaattcgacttcaacgagcaggtgatggcggtggcggtgaaaacgctggcgtcgctggcgctgaacctgccgacattcgggagcggagcatgagcaactcagaactgcaggcctttatcgacgactacattgaccaacgccagccccgcttcagcgcgctgagcgacgcgatttgggaccacccggaaacgcgctttaacgagacctattccgccacgttgctggccgatgcgctggaacaggaaggcttctcggttgaacgcggcgtgggcgacatcgagacggcgttcatcgccagttacggcagcggccacccgattatcgcgctgctgggcgagtacgacgcgctggccgggctgagccagcaggccggttgcgccacgccgcagccgctggtggaaaacggcaacggccatggctgcggccacaacctgctgggtaccgccgcgctggcgggcgccttcgccgccaaggcgtggatgcagcagaaccggctgagcggcaccctgcgcttctacggctgcccgggcgaagaaggcggctccggcaagacctttatggtgcgcgaaggcctgttcgacgacgtcgacgccgccctcacctggcacccggaaggcttcagcggcatgttcaataccagcacgctagccaacatccaggcggcatttcacttcaagggcgtcgccgcccatgccgccaactcgccgcacctggggcgcagcgcgctggacgcggtgacgctgatgaataccggcgccaacttcctgcgcgaacatatcgtgcaggaagcgcggctgcactacgcggtcaccaacaccggcggcagctcccccaacgtggtgcaggccgacgccgaggtgttgtacctgatccgcgcgccgcagctcgctcaggcgcaggacatttaccagcgggtgatcaacatcgccaagggcgcagcgctgatgactgacacccagatggaggtgcgcttcgacaaggcctgctccaattatgtgccgaaccgcagcctggaacgcgcgatgtatcaaaacctgtgcgatttcggtctgcccgagtacagcgacgccgagcgccgcttcgccgaggaaatccgccaaaccctgagccgcgacgatctgcgcaacgccaaactcaatattgcccgcaccggcggcgcggccgggcgcgaatgggtgcagcagttgggagataaggtgctgatggacgaggtcgcgccttatgtggaatccgacgatctgctgtacggctctaccgacgttggcgacgtgagctgggtggcgccgaccgcccaatgcttcagtccctgtttcgcactcggcactccgctgcacacctggcaactggtggcgcagggccgcaccgctatcgcccataagggcatgtgcctggccggcaaggtgatggcggcgaccgccatcgatctgctgagcgacagcgccctgctggcgcgctgccgcagcgagttcgagcgccggcgcgccgaacagccgtaccgctgcccaatcccgcagggggtgcaaccatcgccattgaaatagcatgaacagacagggcccggacaaccgggccactaagtataattataaataaatcaaataataacaatcacacaacagagcaaacacagagggtaaaatcatgagtgaggccacaacgccaatcaataaaagccccggacgcgttttttactgggtggaacgcatcggcaataagatccccaatccgtttttactgttcgtctatttgatcctggtgcttatgctggccaccgcgctgttttcctggctcgatgtggcggtgaaaaatccggccaccggcgagctcatcaaggtgaataacctgatgagcgtggcgggcatgcagtggatatttcccaatatcatccataacttcagcagctttgcgccgctgggggctattttggcgctggtgataggagccggcctggcggaaaaggtcggcctgctgcaggcgttgatgtacaaaatggcctcgcgcgtcagtgcccgctacgccagctatatggtgctgtttatcgccttcttcagccatatatcgtcggacgctgcgctggtggtgatgccgccgctcggcgcgctgatgtttatcgcggtaggccgccaccctatagccgggctgctggcggcgatcgccggcgtcgcctccggctttaccgccaacctgttgatcgtcaccaccgacgtattgctttccggcatcagcaccgaagccaccaaagcggtggacggcgcggttcacgtcagcgtgatcgacaactggtactttatggccacctccgtgatcgtgctgaccatcgccggcgcgctgctcaccgacaagtttatcgagccccgtctgccgaagtggcaaggcggcgccgaagacaaaatcgcagcgctgaccccgctgcagaaccgggggctgatgatgagcggcatcgccgcgctggtgtttatcgccatcatcgccgctctggtggtgccggaggccgcgccgctgcgtgacccgaacaccggttcggtgatcccttccccgttcatcaagggtattgtgccgatcatcatcctgttcttcttcaccgtcgccattacctatggcgtggtcaccaaacagatccgacggccggacgatattccccaccacttgctcgatccgatgaaaagcatggcgggttttatcgtgatggtgtttccgctgtcgcagttcgtggcgttctttaactggagcaacatgggcaagtttatggccgtcggcctgaccgatatgctggaagccgccggcatgagcggcgcaccggcatttctcggcctgatgttcctctccgccttcctgtgcatgttcatcgccagcggctcggcgatctggtcaattttggcgccgatcttcgtgccgatgtttatgctgctcggtttccacccggcgttcgcccagatgatcttccgcatcgccgactctgcggtgctgccgctggcgccgatgtcgccgttcctgccgctgttcctcggcttcctgcagcgctaccgcaaagacgcgcagctcggcacctattacgtgctgatcctgccctatcctttggtgttcttcagcgtgtggattttgctgctgctggtctggtatgcgttaggcttgccaatcggtcccggcgtctatccgaagctgggctaaacgcaccgctatctctccccgcgccggttcgcggggcagatccccttctccccaagcccagcagaaagattgatcttcctcactgaccaagcggctctgaggattatttcattgccttgctaaaccggttcttctattttagctcaccatctgacaacgacaaaaacagggattaagcatgatgaatcgcgtatgggtactgggcgacgccgtgatcgacctggtgccggaaaatgccaacggttatctcaaatgccccggcggcgcgccggcgaacgtggcggtgggtatcgcccgcttgggcggcgacagcgcctttatcggccgggtggggcaagacagcttcggcgcctttctgcagcaggtgctgagcgatgaaggggtggatatcggccatatgcggccggatcccgaacaccacacctccacggtagtggtggatctcgatcttcagggtgagcgctcattcacgtttatggtgcagcccagcgccgatctgtttttgcagcccgacgatctgccggctttccagcggggcgagtggctgcacctctgctccatcgcgctgtcgcaggagcccagccgcagcgcggcctttacggcgatggaacgcatgcgggcagtcggcggccgggtcagtttcgatcccaacatccgcgaagaggtctggcgccaaccggaagcgctgcgcccctgcctgcaaaaggcgctgctgctggcggacgtggtgaaactgtcgcgcgaagagctggctttcatcagccatcttgacgatctggagaacgccatgcgctggatgatgcaaacctatccgctgcgcctgctgctggtgacgctgggcggcgacggcgtctgcgtacacgacgggcatcgtctgcgccatttccgcgcgccgcctgtcgtgccggtcgataccaccggcgccggcgacgccttcgtcgccgggctgttagcggcgctggcgcgccttcacgcattgccgcaggaagcgcaatggccggcggttatcgctcaggctcaggcctgcggcgcgctggccaccaccgccaagggcgccatgaccgccctgccccgcgccgacgagttggctgctttcctgcgttgatcccctgcatccacggcgcccccctgagcgccgtggtcttttaacccgcgatttgcgtactcgatcacaatagctgaatcgggttagcaaacttgattgccagtccgcttctcgatcgctatctttcgccatgaaaaaccggtttagcaatttagcaaaaaataataacaacccttcccggatgatagacgatgatgaaaaaactcagctatttggcgataacaacagggcttttcctctccacgtctgccgcagcgacctcgggcggcgacagtatcgaggcgcgtctcaacgcgctggaacaacgcctggcgcaggcggaacggcgcgccgctcaggctgaaacccgcgccacggcggcggaacgccgggcgcaacagctggaacagcgcaccgccagcaccgaaaggcaaaccgcgcaggtcgcgcagcgcgccgccacgctggaaacgcaatcctctccgaccagcgcgctgaaactgaacggtttcaacgatctgaaactgtatggcgacgtggagttcaacctggacggcgccagccgcagcggccagctgacgtcgttgaaaggcagcgaccacaaggactggaaacccggcaacaaagagcgctgggacatcaacggccgcattctggtcgggctggacggctaccgccgcaatccggacggtaacttctccggcttcagcgtccagccgctggcggacatgagcggcaaaatgaacctggacgacgccgctttcttcttcggcaatgaaaagaactggcaaaccaaaatcggccgcttcgaagcctacgacatgttcccgctgaatcaggacaccttcattcaatactccggcaataccgccaacgacctgtacgccgacggcttcggctatatctacatgatgaaagaaggccgcggccgtagcagcagcggcggcaacctgatgctgagcaaatacgccggggatgtctatttcgaactgaacacgctggtggaagacggcacctcgctgttccaggacaacagctaccacggcaatgcgctggaaaataagaaaaacgtcgcctatttgcgcccggtgatcgcctggaagaaagacgccttcagcatcgcggcggcgatggaaagcaacgtggtgaataacgcctacggctatcaggacagccagggccgcttcgtcgatcaatccaagcgcaacggctacggcatgaccatgagctggaacaccaacgcggccgatccggataacggcgtggtggccaacctgagcgccgcctacctggatgccaccggcgagcaagacttgaccgccggcgtcaacgtgctgtggcgacgcttcgaactgggttatatctatgcgcacaacaatatcaaagagttcaataccgccgggatcgccgccgatatccacaacccgctcagcgaaccgggcaactacgacatccacaccgttcatgcgtcgtatcagatacctaacattatgaatatgaagaatttcaacctgtatttaggcgcctatgtctcgctgctggaagccaacgccgacagcaagatagccaacggcgacaacgaccagcgttacggcatgcgcgccagattcaagtatttcttctgacatcgattcacgtcgctgcgccgcaaactgcgcagcggcatttttatttagcaaggggacaacatggacattaccgcaaccgccaacgcgctgttgccgctgctcggcggtaaagagaacatcgccagcgccgcccactgcgccacgcgcctgcgcctggtgctggtggacgacagcaaggtggacaaagaggccatcggcaaactggacggcgtcaaaggctgcttcagcaacgccggccagatccaggtgatcttcggcaccgggctggtcaataaggtgcatgcggaattcatcaaggcggcgggcgtcagcgaatccagcaaggccgaagccgccgatatcgcggcgaaaaagctcaacccgctgcagcgcatcgcccgcctgctgtcgaacatcttcgtgcctatcattccggcgatcgtcgcttccggcctgttgatggggctgctcggcatggtgaaaacctatggctgggccgatgccaacagcgcgctgttcatcatgctggatatgttcagctcggcggcgttcattatcctgccgattctgatcggcttcaccgccgcacgcgaattcggcggcaatccctatctgggcgccacgctcggcggcattttgacgcatccggcgctgaccaatgcctggggcgtcgccggagggttccacaccatgaacttcttcggtctggacatcgccatgatcggctaccagggcacggtattcccggtgctgctgacggtgtggttcatgagcctgttggaaaaacggctgcgcaaggtgatccccaacgcgctggatttgatcctgacgccgttcctgacggtggtgatctcaggctttgtcgccctgctgtttatcggccccgccggccgcgcgctgggcgatggcatctccttcgtgctcagcacgctgattgctcatgcggggtggttagccgggctgctgttcggcggcctctattccgctatcgtcatcactggcatccaccacagtttccacgcggtagaagccgggctgctcggcaaccccaatatcggcgtcaacttcctgctgccgatctggtcgatggccaacatcgctcaaggcggcgcctgcctggcggtctatttcaaaacccgcgacgccaaaatcaaagccattgcggtgccttcggccttttccgccatgctcggcatcaccgaggcggcgctgtttggcatcaacctgcgcttcgtgaaaccgtttctggcggcgctggcgggcggcgcgctcggcggcgcctgggtggtggccaaccatgtcggcatgaacgcggtcgggctgacggcgatccccggcatggcgatcgtgcaggccagttctctggtcagctatatcatcggtctggcgatcgcgtttggcagcgcctttgtcctctccctactgctgaaatacaacacggacgcgcaatgatggaagaactcagcttaatcaaacaggcactgcgggcggtaatgaacggccagccgctcgcgctgcgcgatccgcaccgaccggactggcatctggcacccagcgttggcctgctgaacgatcccaacggctttatccagcataacggcgtttatcatctgttttatcagtggaatccgctgggttgcgatcatcgcaacaaatgctggggacactggcagtcggctgatttgctgcgttgggagcaccagccaatcgccctggcgcccggcgcctgttacgacagccacggctgttactccggctcggcggtggtggcggaaggcaaaatcacgctgatctacaccggcaacgtgaaattcccagacggctcacgcaccgcttaccaatgcctggctcaggaaagcgaacggggcgaatatcgcaaactcgggccggtgctgccgctgccggagggctacagcggtcacgtacgcgatccgaaagtgtggcgtcatcaaaatgactggtacatggtgctcggcgcgcgtgacctgcaggatcgcggcaaggtgctgctgtttcgttccagcgatctgcgcgactggcaagcgctgggagagatcgccggttccggactgaacggcttagaggaattcggctacatgtgggagtgcccggacctgttctcgttggacggcgacgaggtgttgatctgctgtccgcaggggctgacgccgcagccggaacgctatctcaaccgttatcaggccggttatctgctcggcaagctggattaccggcaggcggccttcagccacggcgaattccgcgagctggacgccggcttcgagttctacgcgccgcagacgacgttggcggaagatggccgccgcctgctgttcggctggatgggcgtgcccgagcaagatgaagaagcccatccgacgcgccgttacggctggatccacaccatgacctgcccgcgcgaactgtcgctgcggcatggccgcctccaccagcgcccggcgcgcgagctgcaacagctgcgcggtgagcgagcaggctggcaaggccgcgccgataacgcccccgcctatgcgctgggggccgcggagctgcaattgacgccgcagggcccgttcaacgcaacctttggcgacgcgatgacgctgaactgggacggcgaaaggctgcggctgacacgtgcttccctgaccgacggccggccggagcaccgttactggcgcggcccggtcacgcatctgcaactgctgttcgatcgttccagcgtggagattttcatcaaccacggcgaggcggtgatgagcgcacgctacttcccggcgggtgagccgcaactgcggctgtgcgggagcgcgccgctggcgttggaatactggccgctgacgccatgcatgctagaatgacgcatcctccgatgacttcagatggcgtcagtgaaaaaaaataaacgcattaccatcagtgacatcgccacgctggccggggtgtcgaaatcgaccgccagcctggtgctgaacggccgcagcaaggaataccgggtgtccgacgacacccgcgatcgcattctggcgctggcgcacgaacaccattatcagcccagcatccacgcccgctctttgcgctccaaccgcagccacacgctggggttggtggtaccggagatgaccaactacggctttgcggtgatttcgcgcgagctggaaacgctgtgccgcgaagccgggctgcagctgttgatcgcctgtaccgatgaaaacccggcgcaggaaatgatggcggtgaacagtctggtgcagcggcaggtggacggcttgattgtcgcctccagccagctaaacgacgcggaataccagaagatcaatgtcggactgccggtggtgcagatggaccgtctgatcgccggttccgaactgccgctggtgatcaccgattcggtcaactcgaccgccgacctggtggaaaaggtcgcgcgccaacatccggacgagatctattttctcggcgggcagccgcgcatttcgccgacccgcgatcggctggccggtttccagcttggcctgcagcgcgccggcatcgagtgcaaaccggaatggatcatcaacggcaactatcaccccagctcagggtacgagatgttcgctcagctgtgcgcacagctggggcggccgcccaaagcgctgtttaccgccgcctgcggcctgttggaaggggtattgcgttatctgactcaacatcagctgatggagagcgacatccacctgtgcagcttcgacgatcactacctgttcgactgcatgacgctgaagatcgatacggtcgcacaggactgccgggcgctggcgcaacatagcttcgaccaagtcaccgcactgatcgacgagcggccgctggaacagaacgcgctttatctgccgggccgtatccgctggcgccatgccggttcccgggctttgttggccgaagagtgatatctctgaaccagtaaaaagggcgccgaagcgcccttttttgtttcatcagcccgctacttggcggcgccttccatgcccaccagccccactttcaggtagccggctttacgcagggtgtccatcacgctcatcagcgtttcatagtccacgctcttgtccgcctggaagaagatggtggtttctttgttcgcctgggtgcgttgatccagcaccgaagtcaactgatcggcattcaccggctgatcgccgacgtagagctgcttgtcggccttcaccgacaggaacaccggtttttccggccgcggctgcggcttggcggaggaggccggcagatcgacgcggatatctaccgttgccagcggcgcggccaccataaagatgatcaacagcaccaacatgacgtcgataaacggcgttacgttgatttcatgcagttcgccgctgtcgtccagatcttcatttaagcgcatcgccatgtctcaccccgcccgcagttgatgtgcgtgctgagagcgcttggcttccgccgtcgcggccagatccaaatcacggccctgcagcagcaagacctgcgccgccacgtcgcccacctgcgcgcggtggccgctgatgacgcgagcgaagatgttgtagataacgacggcagggatcgccgcgaccagacccagtgcggtcgccaacagcgcttccgcgatgcccggcgccacgaccgccaggttggtggtctgcgaatgggcgatgccgatgaagctgttcatgatgccccacacggtgccgaacaggccgacgaacggcgagatggcgccgatggtggccaggaagccgttgccgcggcccatgttgcggctgtaggccgccacgcggcgctcgaggcggaagccggtgcgctctttgatgccgttgttgtcgttggattccgcagacaactccagctcattttgcgcgtcgttcagcaataccgcgctgacgctctccggaccgaagttttgcgccagttcggaggcttcatccagcgagcgcgcttcggccagcgccagctgttcgcggcgcagacggcgcttggcgcgcagcagttcgctgcctttggagaacagaatggtccaggtcacgatcgaggccagcaccaggccgatcattaccgctttcaccaccgcgtcggcgtgctggtacatgccccaaacggacaggtccatgccgcgggtttccggtggctggatcgttggcgccgggttcaccggcgtgatgctctccggcgcggcggctgcagcaggtgcaggcgcggtggtcggcgcaacgctttcggcaacggccggattgctcgccggcgcggcctgcgcgctgccggccagccctacgaccagcaccatagatgccatcaggctgcggccgaaggccttgccccactgcgcccggccctggccgaacgatccttgatttaaattcttgccagccgttttcacgctgtgcctccacccattaccgatcaaaattaaggaataattcagcgtgcgatcatatcaaaccaaccggggattgatagtggttctcattattatttaccaaataaacgagaaaattttagccagcatcgccacaaagcgccaatctgtgtccgttcaccgccaaatgccccttttatagggtgatttcgttacttttcttccacaacgacgcaacaacgccacgctgccgaacggcgcctcagccgaggaatggacttctctgttcccactcggcagaaggattacgcgagaaatgcgtgaccggcagccaattatagccgtttctatatctggaagttaaaacgtctggatggctatattaactcatgttaacgtaagggctatcgtaaacgggcacgtgcagagcaaccagaggtgagccaggtaccatgacgtcaaaacatatcgaaaccgcgctgatcggcgccggccgcggcaaacgctacacccagggctccgtcaatcccgtcacgcaacgcgcctcttctttggtcttcgactccgtcgctgccaaaaaacacgccaccgcgcaacgcgctcacggcgagctgttttacggccgacgcggcaccctgacccacttcgccctgcaggatgcgatggtggagctggagggcggcgccggctgcgtgctgtacccctgcggcgcggcggcggtggccaatgcgatcctgtcgttcgtcggcgccggcgatcacctgctggtcaccggctctgcgtacgagccgacccaggatttctgcacccatatcctcggccgcatgaacgtcagcaccacctatttcgatccgctgatcggcgccgacatcgccaaactgatccagcccaatacccgcgtggtgttcctggaatcccccggctccatcaccctggaagtgcaggatatcccggcgatggtgcaggccattcgcgccgtggcgccggaggtggtgatcatgatagacaacacctgggcggcgggggtgctgttcaaggcgctggatttcgacatcgacatttctattcaggccggcaccaaatacctgatcggccattccgattacatgcttggcaccgccgtcgccaacgcgcgctgttgggatcaactgcgcgagtactcctatctgatggggcagatggtggatgccgacaccgcctacatggcgagccgcggcctgcgtaccctgagcgtgcgcctgaagcagcacgaacgcagcagcatcgaggtcgccaactggctggcggcgcggccggaggtggcgacggtcaatcatccggccctgccgagctgcaagggccacgagttctaccgccgcgacttcagcggctgcaacgggctgttctctttcgtgctgaaggaacggctggacgatacgcagttggccgcttacctggataacttcagccacttcagcatggcctactcctggggcggcttcgagtcgctgatcctggccaaccagccggaagaactggaagcgatccgcccggcgggcggcgtcgatttttccggcacgctggtgcggttgcatatcggcctggagaacgtcgaagacctgatcgccgatctggcggccggcttcgatcgcctcaatggcgtgcgctaaggcggattccgataattttcttcgtctcgtttaatgtcggcttaagctattagcggtacactaaccgggtaactgtcagatacggtaaccgccgcatcctggagaatgtgaccccgggcgcaaccggcatgcaacaggacataaaatggatgtattacgagagattattcatgcgctttggcagcaggactttatcgccctcgccgatccaagcgtaatttgggtggtttacgccgtacttttcaccactctgtttttggaaaacggactgctgcccgcctccttccttcccggtgacagcctgctgctgctgtcgggcgcgctgatcgccaaaggcgtgatgggctttgcccccaccctgctgattctgaccgccgccgccggtctcggctgctggctgagctatatccagggccgctggctgggccacaccggcctggtgaagagctggctgctgcaactgccggcacagtaccaccagcgcgcgcacaacctgttcaaccgccacgggctgacggcgctgctgatcggccgcttcctcggtttcgtgcgcaccctgctgccgaccatggccggcatttccgggctcaacagctctcgtttccaggtgttcaactggctgagcgcggcgatctgggtctgcgcgctggtcggcctcggctacgcgttcagccaaatccctctggtgaaacgctacgaaagccaggtgatgaccggcctgatgctgctgccgctgctgctgctgtttgtcggcctgctgggtgccatgctggtgatctggcgtaaaaaacgcgccgcctcttcctgaatcgggcgcgctacagcgccttctcgaccaacgccagactggcaggcagtttgctcaccagcgtatccaccgccagccgcaccttcagcggcaggtgaggcgtgtgcggccacaccgcatgcgcttcaaaggcggcgcccggccgatcgcgcagcaagcgcaccagtgccccgctcaacaactgctcacgcaccagccagcacggcagccaggcgatgccgaaacccgccgtcgccgcatccgcaatcgcctgcaggtcgtccatttgcagccggttgttcggcatcacgtcctgcggcttgccgtcgctatccaataccagccagctgcgccgtgcgccggcgcgcatataggtcaccgcctcatgctgcgccagttgctcgatgctgtgcggttcgccgcaccgctgcagataggccggcgaggcgcacagcgtcatacggtgatcgccgatgcggcgcgccaccaagccgctgctgttggccagcgtaccgttgcggatcgccatatcgaagccgtcctcaatcagatccaccacccgatcgctgaacgacagctccaactccaacccaggatgctcgcgcgtcagttcggtcagcagcggcgcaatgcacatgcggccaaacagcaccggcatcgacacccgcagccgaccgctgacctgccgcttgcccgactccagcagcgtttccgcgccacggatctcctccagcgcccgcaggcagcgctcgtagaacagcgcaccgtcgtcggtcaggctctggctgcgcgtggtgcgatgaaacagccgcacccccagccgctgctccaaccgggcgatagttttgccgaccgccgaacgcgaaagatgcagccgactggccgccactgcaaaactgcccgcctccacggcggtaacgaataccgaaatgccgctcaaccgatcgctcatgatttgtcgctctgaaagaaacaatctgcggaaatcttatcgccactggcgaaccttcatcaacgatattatcggcaggtctgttaatcgctgactttggagaacatcatgaccaatacaatgcaacgctggacgatgagcgccctggggcgtgagcacctgcagctgagcgcaagcgccatcccacagccggggccgcacgaaatcagagtgaaagtgaaggctatctcactcaattaccgtgacaaactgatgatagaaagcggcatggggctcacgctgccgcagccgttcacgcccgcctcggacatggccggcgaggtcgatgccatcggccccggcgtcagccgctttcagcccggcgcgcgcgtcatttccaccttcagccccggttggctcgacggcgagcaaaaaccctacggcgatgcgcgccgggtgccttaccacaccctcggcggtttttatcagggcgtgctggcggaatacgtgattttgcatgaagactggctggtagcggcgccggcgtcgctggacgacgtccaggccagcaccctgccgtgcgccgggctgaccgcctggttcgcgctggtggaacaaggcaaactgcatgccggcgatacggtgctggtgcaaggcaccggcggcgtggcgctgttcgcgctgcagatcgccaaagcccacggcgcggaggtctatgtcacctccggcagcgatgaaaagctggcgcgagccctggcattgggcgccaatcatggaatcaaccggctggacggcgattgggtggaggcgatttatgcgctgacgcaggatcgcggcatcgaccatgtgatcgacaccgtcggcggcaccaacctcggcaactcggtgcgcgccgtggcggtgggaggacgcatctcggtaatcggcatcctggaaggcaacgagatttccgctcccgccggcccactgctattaaaatccgcagtaattcagggcatcggcgtcggccaccgccgcgcgctggaagacctggtgcgcgccgtggacgccgtcaacctgcagccggtgatcgaccaggtataccgcttcgatcagctgtctcaggcgttggatcacctcgatcgcgggccattcggcaagatcgtcttaaccccataaacgcggctcagccctccagcagcagcgggttggcctcgcgcagccgggcgacttcatcgctcggcgtcatgccgaacagccgtttgaactcgcggctgaactgcgacgcgctttcgtagccgacgcggatcgccgccgtgctggccttcagaccgtcatgcaccatcaacaggcgcgccttatgcagccggtacgacttcacgtactgcagcggcgaagtgttggtcaccgccttgaagttgtgatggaacgccgagacgctcatgttgacctcgctggccaactgctcgacgttgatgctgtcggcatactgatgttcgatacgccgcagtgccttggcgatctggctgaagtgggtatgccgattgaccaactcctgcagcgacgcgccgcaggcgccgcgcagcacataatagagaatctcccgtacgatctgcggcccaagcacccgggcgtcgagcggattggccatcacgtccagcagacgctcggtggcgcacagcaactcttccgtcatttccgccaggttcaccccgttgctctccgcccgcggttgcatcaggtagtcgtcatcgccgatgtcgatcagcaagtcctgcagcatttgggtatcgatattgaccgccaacccaaccagcggcagttccgggctggcgaaggtttcgcattcaaacggcagcggcaccgtcatcagcaggtagttgcgcggatcgtattggaacttcttattgccgcaataaccgaccttgtgcccctgaaaaacgatgacgatccccggttcatacatcaccggctgacgcgggctgtggcgatcgacatacaaaatcttcacccgcggcaccggcgacggcgtgtagccgttgccgctggcgatagccatcgcctggcgcgccatgcggctgcgcagcgcatcgatttcaatcacggaaacaccctcttacagtcagaacgattcggcataaatcataatttaaaactcgccatttctacagtgacttgtaggaataggcaagaaccaaacaggaatgtgcattgtgcgttgccgcccggttcctgacaatacgggccagacacctttgcgccgctttggcgcccgcctgacagaaagagagaaatcaaccatgcacaacttcattttgcataccccaaccaaaatcctgttcggcaaggagcaaattgccgaagtggccagccaaatcccggcggacgcgcgcatcctgatcacctacggtggcggcagcgtgaagaaaaacggcgtgctggatcaggtgcatagcgcgctggccggccgcgacgtgcgggagttctccggcatcgagccgaacccgacctacgaaacgctgatgaaagcggtcgaggtggtgaaagcggaaaacatcgatttcctgctggcggtcggcggcggttcggtggttgacggcaccaagttcatcgccgccgccgcccgttataccgccagcagcgacgcctggcacattctgcagaccgtcggcagccacatcgccgacgcggtgccgatgggctgcgtgctgacgctgccggccaccggctccgagtccaacagcggcgcggtgatcacccgcaaaagcagcggcgacaagcagcacttcttctcaccgctggtgcagccgcgcttcgccgtgctggatccggtggtaacctactcgctgccgccgcgccagatcgccaacggcgtggtcgacgccttcgtgcacaccctggagcagtatctgacctatccggtcgacgccaaggtgcaggatcgcttcgccgaaggcctgctgttgaccctgctggaagacggcccgcgcgcgctggccgagccggagaactatgcggtgcgcgccaacgtgatgtggagcgccaccatggcgctgaacggcctgatcggcgccggcgtgccgcaggactgggcgacccacatgctgggccatgagctgaccgccatgcacgatctcgaccacgcgcaaacgctggccatcgtgctgccggcgctgctgcacgagaagaaagcgcagaagcgcgaaaaactgctgcagtacgctgaccgcgtctggggcctgcgcgaaggcagcgaagacagccgcatcgacggcgccatcgccgccacccgcgccttcttcgagcagatgggcgtgccgacccgcatggcggattatcagctcgacggcagcagcattccggcgctgctcgacaagctgcatcagcacggcatgaccgccctgggggagcatcaggacatcaccctggacgtcagccgccgcatttatgaagcggcgcgttaatcgcaaaacggcgattttttgctaggctttagtctccgccagccattttcgccgcatcctgcgcccggccgatcaccgggcgcagtcgggcgcttcagcgccgccgatcgtttcgcaccactcgtcttaccgctcattcgcagggagagcggggagaaaatcgccctcccgccaccgctgaaattaggctggcaaacccggcaaccgcccattttgccaactagaatttatctatagccgtttcggcgccgcaggcgccgcaatccgtacacaaggagatgcgcatgacaacgcaacaacccatcatcaaactccacgatggtaatctgatgccgcagttgggtctcggcgtttggcaggcgagtattgaagagaccacccgcgcggtgagcaaagcgctggagatcggttaccgctccatcgacaccgccgcgatctacaagaacgaggaaggcgtcggcgccgcgctgcagtccagctcgctgccgcgcagcgacctgttcatcaccaccaagctgtggaacgacgatcagggcgatccgctggcggcgctggaaaccagcctggaaaaactcaagctggactatgtggatctgtatctgatccactggccgcgcccgcagcaggatcaatacgtctccgcctggcgcgaactgatcaagctgcgcgagcaaggcctggtgaaaagcatcggcgtgtgcaacttccatacgccgcacctgcagcgcctgctggatgaaaccaacgtggcgccggtggtcaatcagatcgaactgcacccgctgctgcaacagcgccagctgcgcgcctggaacgctacccatcacatcgccaccgaatcctggagcccgctggcgcaaggcggtgaaggggtgttcgaccagccgctgatcaaggcgctggccgagaaatacgagaaaaccccggcgcagattgtggtgcgctggcacctggacagcggtcttatcgtcatcccgaaatcggtcacgccgtcgcgtatccgcgaaaacttcgaggtatttgatttcaaactcgataaggacgagctgggcgagatcgccaagctggacgtcggcaaccgcctggggccggatccggataccctgtaaccccctcaagccctctccggccggagggggcttttccttcccgcacattgctcccttgcgccgcctgacgttatgatgacgacgccggaggctccagccgccggttcacgccgttaaaaaaacagacaagcacggagcaccatgaaattttctttctcacacgggtcacggctgggcatgctttgcatcatgctggtgctggcgggttgcgccggcaagaaacagcgcgtcagctacgatcgccacgccttcgacagcgccattaaagacgccgccagcgaatacggcgtggacgccaagctgatcaccgccatgatccaggtggagtccggcttcaacccttccgcagtgagcagatccaatgcgatcggcctgatgcaactgaaagccgataccgccggctgcgatgcctatcgctacaaaggcaaacgcggctgcccggacgacgatgacctgcgggatcccgacaccaatatcgatcttggcgccgcctatctggccaccttgcaaaaacaacagcttaaagggatcgccaatcccgtcacgctgcgctacgccaccatcatcgcctacgtcaacggcaccggcgcgctgctgcgcaccttctccagcaaccgtcagcaggccatcgcgatgatcaacaacctgtcgccggaggcctttaactggcacgtgcgcaaataccatcccgcgccgcaggcgccgcgccatttgatgaaagtggaagccgcctacgagcagctgtgacgctcaaaagtaaaaaggagaacccgggggttctcctttttgtttacgcacgcggtgcggccgttacggcttggctttgcgaatcggtttacgcgtcggccggttggacggcgtgcgctgccgattgatatcggtatgtttggtcagcgccggccgggtatggcgctgcagccgtttcgcttcgcgctgctcgtcgatgctcggcgccggcaccagacaatcgcggcggctgccgatcaggggcttcaggcccatctcttccagcgcggcgcggatcagcgcccagttggccggatcgtggtaacgcagcagcgccttatgcaggcggcgctggcgatcgccgcgcggcaccaccacgtcttcactcttgtaccccaccttgctcagcgggtttttgccgctgtaatacatggtggtggagttggccatcggcgaaggatagaagttctgcacctgatcgaggcggaaacggttcttcttcagccacagcgccaggttcaccatgtcttcatcacgggtgcccgggtgcgacgagataaagtatgggatcagatactgctctttgcccgccagcttcgaatagtgatcaaacagctgcttgaagcgatcgtagctgcccatgcccggtttcatcatcttcgacagcgggccttcttcggtgtgctccggcgcgatcttcaggtagccgccgacgtggtgggtcgccagttccttgatatagcgcggatcttccaccgccagatcgtaacgtaccccggaggcgatcaggatcttcttgatgccctccagcgaacgcgcgcggcggtaaagcttgatggtcggctcgtggttggtatccatataagtgcagatctccggatacacgcacgaggcgcggcggcaggtctgctcagcgcgcgggttggtgcaacgcagcatatacatgttggcggtcgggccgcccagatcggagatcacaccgataaagcccggcaccttgtcacggatctcttcgatttcgcgaacgatcgaatcttccgaacggctctggatgatgcgcccttcgtgctcggtgatcgaacagaacgaacagccgccgtagcagccgcgcatgatgttcaccgagaaacggatcatgtcataggccggaatgcgatcctggccgtaggacgggtgcggtacgcgttgataaggcagggcgaagacgctgtccatctccggcgtggtcagcgggatcgccggcgggttgatccacacgtagcgatcgccgtgtttttgcatcagcgcgcgggcacagcctgggttggtttcatggtgcaaaatacgcgaggtgtgcgcatacagcaccttgtcgcccttcactttctcgaaggacggcagcagcacgtaggtcttctcccacggcttcggtttggcggcgcgcacggtgacaggtttggcttccggctctttcggcttggcgccgtcggcgcacggcagatcctcgccgtacgggttcgggataggttcgatgcggcccggcttgtcgaggcgggtggaatccacgccgctccaacccggcagcgcttctttgcgcatcaccgcagtattgcggatatcgtggatatcgccgatcttctcaccggcggccagacggtgcgccacttccaccagcggacgctcgccgttgccgtagatcagcatgtcggctttggagtccaccagcaccgagcggcgcacggtatcagaccagtaatcgtagtgggcgatgcgacgcagactggcttcaatgccgcccagcacgatcggcacgtctttataggcttctttgcagcgctggctgtagaccagggtggcgcgatccggccgcttgccgccgacgttgccggcggtataggcatcgtcgtggcgcagtttgcgatcggcggtgtagcggttgatcatcgagtccatgttaccggcggtgatgccgaagaacaggttcggtttccccaaccgcatgaagtcttctttattgctccagtccggctgcgcgatgatgccgacgcgaaagccttgcgcttccagcatgcggccgatgatcgccatgccgaagcttgggtgatcgacgtaggcgtcgccgctgatgatgatcacgtcgcagctgtcccagcccagttgatccatctctgcccgcgacatcggtaaaaacggcgcggtgccaaaacattcggcccaataaggcttataggaaaacagttcacgatcgggttggatcaggctggtggtgctcattctgctgctctttttacaggttaattaatcgccgggcggcgattatacgcactagcagcaaaaagagcatggttatttcgctaaccgttcacttcgaattcataaacgtcgctgcggcacaagatatcgctgaactccagcgcctcaccctgagcgttgcggctggtttggatgatgtgcaacaacggcgcgccgcacggcacgttgagcagttcggcgacctcgtcgctgcaggacaccgccttcaacagaaagtgtttatcctccggcacgatgccgcgcgattgccataacgcatacagcgagtgttccagctccgccggttcgggcaagaagcgcggtggtatataggtggtttccagcgagaccgggctgccgttcagcaagcgtaaccgccgcagtttgatcacttcatccccctccgccagtcccaacgccgccgcggccttggccggcgcgccgactcgggtgcgcagcagccatcgattgctgacgcggctgccatgacgcagcgcctgagcggtaaacccgctgtccttatcgagggaatagccgatgcgcatcgccacgcgggtgccaacgccctgctgccgcgaaatcagccccttctcctccagcagcttcatcgccttgctgacggtgacacgcgacagcgccaaaccttccgccatctgccgttccggcggcagaaatgcctccgccgccaacacctgctgcctgatcgcggtttctatcgccgtcgccagctgaatataacgcggcgctaccgccccctgggccagatggccacgcagccaggccataaaatccgtcattcgcccgccctcttacctatgccatttgtctggatttcgttttttatcctatcgccgatccagcgataagcccctcaccttaactaaaatatcgctaatgttttcagagtggcatcacaatttttgcctaatggactttcattggatctagatcgcgcgtaatctgtgcttattgatgttgatacatcaatcgcaccaacaccagggacccactttaaaaacaataaaaaacccgctgccagccctaaaggatacccttgatggccggtagcgggtctatactgtcagcacaaacggccgagaataagcaacgtagctaatggatagcctgctcactgctcatcgccgcatcacaggatcccctcgcggtgggcgaaccggatcgatgtcggcaaatagaaaggttcccgcttcgccaaaccccgctgcagacccactctttgactacactcattggcgccgtgcggccgacgtgcctcacccgataaggcggataccgccctcattttgacagacccggcggcatcagccgctacacactgcgcggaatcggcgtcttcaccgataacgggatagccggcctcaaccgcgccaacggaatcgattttcagtcaactgcggcggccctcgcggccctgcgcaacagggatcatttgctatgaccgatatcaatcgcaatgaagcatggaaggtagaaagcaccggtatcgaccgggtgccggacgcggaacagaccggtaagcccatcgagctgttttggatctggtcggcagccaatatcggtattctcggcgtggtgtacggcgccatcatcgtcggcttcggcttatcctttctgcaatcggtactcgccgcgctggtcggcgtcgccagcttcgtgctggtcggcctcaccagcttcgccggcaagcgtgggcgtacctctacgctgacgctctcgcgagtgattttcgggctgaagggcaacgtggcgcccaccctgttcagttggatcaacctgatgggctgggaagcggtcaacgtgatcaccggcaccctgacgctggcggcgctgttcgaggccttcggactgggaaccagccacctgctgaccgcgctcagcctgctgctgttcggcgggctcactgtcgtcgtcagcctgctggggcaaaataccgtggtctggatgcaaagctggttcagccgcatcttcggcaccatgacgctgatcgtggtgctctatatcctgttcaataccgagtggagccaggtgctggcgctgccatccggcagctggctgaccggtttcctgccggcggtatcggtgatcgccgccggcaccggcatcagctgggcaatcgccggcgccgattacagccgctatcaaagcccgagctcgtcgagcaaaggcattttcgccgcggtgatgggcggtgcctgtttgccgctaatgctgctgatgctggccggtattctgctttccgtacagctccccgatctggccagcgccgccaaccccatcgcgctgataggctcggtgctgcccgcctggatggccatcccttatctgctggccgccaccgccggcatcgtcaccatcgcggtgctcagcctgtattccgccagccttaacctgctgaccatcggcgtgcaggtcaaacagtggctggcggtatcgatcgacgccgtggtggtgctgggcatcgccctgtatgtgctgttcatctccggcgactttatggggccgttcatctccttcctggtgttctgcggggtgttcctggcggcctgggaggcgattttcctgctcgattacctgtgcctgcgccgccgccacgggtatgatggcaacgctttgtacggcctgcatggccagaaccgcggcgtgcgcaaagccccgctgttctgctggttcctcggcgccctgtgcggcctgctggtcaccaaaaccggttttatcgacggcccgctggccaaaggcttgttcgccgactccagcctggggctgtttgtgtcgtttgcggttagtctgatcgcttacggtctgtacctgacccaacgcagagaacatcaatgaatgagagggaagctgtaacacctgtcctggtgatggggggcgcggtcggcgatctggtgatgacgctgccccgcctgccgacccgaggtgaagatatcgaagcccagccgcaggcgcggcaaatcggcggctgcgcgttcaacgtagcgcgcgcgttgacgcgccttgaagtgccggtgatcaacggtatgccggtcggcaacggcgaatggggcgcggcgatcgaagccgccatgggcgaactggggctggaggtgctgttgcgccacggccagatggacaacggctggtgcctggcgctggtggaaccggacggtgaacgcacctttatcacggtttccggttgcgaaagccaatggaataaagcgcagctggcgaccctgccgctgacggaacacacgctgatctacgccagcggctacgagctggccggtgaaaacggcgaagcgctgcgcgagtggctgacgcgcatgccgttcgaccaaccgcgcctgatcgatcccggcccgcgcgtcgcccagctcagcgaagatttcttcgccatgctcagcgacagccacaccctgctgacgcttaaccgcgacgaagtggccacgctgtgcggcgccggcgacgccgtggaggccgcacagcgctatgccgccgcgcgtaatctgacgctgatttgccgcctggatcgcgacggcgcatggatctgcgacggccgtacgccgccgctgcacgttccggcctatccggtagaggtcgttgacaccatcggcgcgggcgatgcccactgcgccggtttgctggcgggcctgtccgccggctggccgctgccgcaggcggtcgatctggccaaccgggtcgccgcttgcgtggtggccagcctcggggccgccaatccgccggaccagcagcagctgcagcagcgcttcccgcaggcctgacgtttcagggcgcagcaaagccgcgccctctgcctcactgcgccgccgccgcgttctcctgcggcaggtggcgatagttgaagctcaacgcgaacacaatccccagcaccagcgtatacagcgcaaacaccagccagatgctctgccagtctttcacgccgtcatggctgaagaagtccaccacctcaccgctggcgagcgcccccagataggcgcccaaaccgttcaccatggtcatgaacagcccctgcgcgctggcgcggatgcggtgatcggcctccttctcgacgaagatggcgccggagatattaaagaagtcgaacgcacagccgtagacaatcatcgacagcaacagcagcacgaaaccaaagccgaccggcgtgccgtacgccaggaatagaaagcgcagcgtccaggccgccatgctgatcagcatcacctgcttgatgccgtaacggcgcaggaagaagggtatggtgaggataaagaacacttcagagatctgcgacagcgacagcagcaccgccggataccggacgctgaggctgtcctgatacagcggattgagcgacagatcgtgcaggaacgggttgccgaaggtattggttatctgcagcgccgcgccaagcaacatggcgaacaggaaaaacagcgccatgcgccgctggcggaacaacaccagcgcatctagccccaacacgctcacccagctcttcgactcggccgcgcggttggtcgggcagcgcggcagcgtcagcgaataggcggacagcagcagcgacgccgcagaagccagatacagctgcaggttgctgagctcgatgcggctgaaaccgaccaaccacatcgccagaatgaaccccacggtgccgtacacccgcaccggcggaaagtccctcaccgtgtcaaagccgtgtttctccaggcaaaaataggaaatggcgttggagagcgcgatggtcggcatatagaccatggcattgaacagcatcacccagaacatcagcatcggttgctcgacctgcgctgcgcagtacagcgccagcgccccgagcaggtggcaaagcgcatacagatagttggccttcatccaacggtcggcgatgatgcccgccaggcccggcatgatcagcgccgcgatgcctttggcgctgtaaaccatccccacctgcatgccgctgaaatgcagcgtgttgatcatgtaggagcccagcgtcaccagccaggcgccccagataaagaactgcaggaaaatcatgacttttaatcgtgtttttatcgccatcgccatcaccttgttattatgctttcaacgatgattggtgcggcgggccccctgcagcccgccgccggtctgcttgcggtgttacagcgttttgaacagctcgcggatcaggcgcatgaaatcgtccgccgccagcgccgcgcagctgagcgtttgttcgtgagaaagaggcgtatccgacagcccttcggcgtagttggtcatcgcggacaccaccagcaccttgaggccacagtgccgcgccgtcaggacttccggcacgatcgacatccccaccacgtcgcagcccagggtctgcatcatgcggatctccgccggcgtttcgaagttcggcccggtgtaggcggcgaataccccttccgccagcgggatgcccgcgctttcggccaccgccgccagccgggcgcgcagatcgcgatcgtaagcgttcgccaggctgaagaagcgcggcccgaagcgatcgtcgttggcgccgaccagcggtgattccggcatgaaattgatgtgatcggtaatggccaccaggctgcccggcgccaccgaacggcgcagcgaaccggcggcattggtcgccagcaggaattcgcaacccagcagtttgaaggtgcgcactgcggtggtcatcacctgcatgccacgcccttcatagaaatgaccgcgccctttcatgcacaataccggcacgccctccagcttgccggcgaccagttgcccggcgtggccggcgacgccgctcaccgggaagcccggcagctccgcgtaatcgagggtgacggtttcggtcatcacctccgccagggcgccgagcccggagccgagaatcaaggccgctttcggctggaaacccggcaggcgtgcgcggacgacatcggcgcaggtaaaagcatcttcttgattaaacatcgtattctctctttcagcgggggataataagccccatagtagagagcgaggcgcggccgagaccaatacattcttggcggccgatttattccatttacctataagttgagctgcgtcacaaggaggagataccccggatgaacccgccccaagccctgcccgatcccggccggattaacttccgcctgctgcactatttccgcgtggtggcggaagagatgaacttcacccaggcggcgcggcggctgaatatgtcacagccgccgctcagcaaacacatcaaagagctggagagtcagcttggcgtcgtgctattcaaacgcaccacccgctccatgacgctgacgccggccgggcgcacgctgctgcgcaacgtcgagcggctgctggatcaggccgacagcgcgttgcatcaggtgcaacagatgggacgtggcgaaggcggccacatggtggtcggcatggtcggcacctcggcctggggcggcctgatcgcggcgctgcggcggttcagcgagcggagcgccggcgtcacctggtcgttgaacgagctgacgcccagccagcaaatcgccgcgctgcaaaagcggcatatcgacatcggggtctggcgagaggcgcagcagcagacgctgccggggttaacctgccaacggttggcaagcgagagcatcgccgtggtgctgccgctcgatcatccgctggcgcggcaggaaaacatcccgctggcggcgctgcagaacgacagcttcatcgtgctgccgccgcatgaggccagcctggggctgtatctgcacaatctgtgtctgctgcagggatttctgccggacgtcgcttatcaggtcaacgaaccgcagaccctgctggcgctggtggcggaaggctgcggcatcacgctgctgccggacagctacggccgcatcccgtggcccggcgtacgcttttgctcgctgcaacaggcgccgccggcggatttatacgcggtgtatcgcgccgacagcgtcacgccggtggtgcaggccttcctggaaatgctgcgggcgccgtaagcggcccacagcgcagattacatcgtcggctgcaccatcagctggccggcggtgccgcgatcggccatctccagcgtctggctgtaatacaggaacgggaagtgttcggaggtaggttggttgaaatacaccagcagctcgacgtcgccatcaacccagacggtgtccttccagccgcgatcttccgccatcggctgcgcgccgttgacgcgtttaatcaggaactgcacgccctgaatatggaacgcctgcggcgtatccgcgtgaatgttccagcgttcccaggtgccttgctgcgcctgtacgtcgatgcggttcatgtcccaaatcgcgccgttgatgccgacgccgccgtcgcccaggcggaaatcgcgggtgcggctggcgctgccgtccaacagctgatccgccagcaggcgcatcggcaggttgtcggtcaccagtggcagcaggccggtcgggcgcagcgtcagcacctgggtggacaccagaatgctcgacggctcgaacaggccgcgcaggcgatccatgatgcccgccgcttcaccggcggtgatggtcacctcctcgcccttcgacatgtcgatcagcacttcccggcgttcgccaggcgccaacgacagctgctgcaccgcgaccggcgcaggcaggaagccctgatcgctggcaatcacgttgaacggccgcccgtcgctgagctgcagggtatagcggcgcgcgttggaggcgttaagcaggcgcagacgcacccagccgcgcgacacgtcgacatacgggttttgcacgccgttgaccaacagcgtatcgccgacgaaaccgccctgcgacggtgcatcgtattgcggtgtgccgaagttatcgaagcgtttgtcctgaatgatcagcgggaaatcgtcgacgccgtagtggttgggtagcggcagcgctttgctgacggcatcttccaccagccacagcccggccagcccgttgtaaacgtgcggcgccatacggttcggcgtgttggcgtggtaccagcaggtggccgccgcctgacgaatgggcagcaccggcgaccagtcgacgttaggcgacatcatgcgcggcgcgccgcccatcagcgtgcctggcacctgcagaccgctgacggtcatcgctaccggctcctgcaggcggttgctgtagatcagtttgacgtcgtcaccgctgtaaacccgcaccgtcggccccaggtacatgccgttgatgccccacaccgccgctttacggttatccataaacgcccaatgggcgcgctgcaaggtcaggaacagcggctgaccgcggcgagactccagcagcgggggaatgggtaacggggtctgcgttccgctcgcctcagccctcagcggcacggcgcccgcgcacagcgccaggcccgatgcctgtaaaaactgacgtcgactgagtgacatattttctccatgaaaagcaataactaaaccgtgtgcaaaacccaaacgcccgccaatcaagattagcaggcgttcaggcgttaacggcgctgaacgccaattaaaaccctattctttgaagccggtagactcttattttttggcggcgttgcgctgggcgacttcggcgtccaattcggcgattttcgcctccatcagctcgcggcaatgggccgccagctcacgcacgttttctttgccgtatttgctggtatccaccggcgccaacatctcgacgatcacatgaccgttattccagcgattaagatttatattaccgctggtggtggatacgcagatcggcacaatcggcacgccggcggcaatggccgcgtggaaggcgccggttttaaacggcatcagcccacgaccgcggctgcgggtcccttccgggaacatccagatcgaaatgtctttctttttgaactgctccgccacctgggcgatggtgccgtgcgccttggcgcgattatcacgatctatcagcagattaccggtcagccaatacagcgggccgaaaaacgggatccacaccagactttttttaccgacggtcacggtgcgcggctgcacgatattggaggccgtcaccatgtcgtagttattttggtggttggcgatatagatgcagttgccattgttggccgcatcggccggcacgcgggtttcaaccttgatgccgaacagcgtcgacaggcggccgaaaagatggccgaaggtcgccacatggcgagggttgcgcgggctgaacaagcaataaacagaaccgaaaatacacaccagaatacagaaaagagtggcgagaacggcacgcaaaatcaataacataacaacctcattagcacactgccaacgcagtttacttcgctgcgcagattcctttactcattatttgccggccaggcggtaagcacgccgatgtcgcctgcatttctcgctattttcctgccaggcggcagtacgcacaataattttatgcgcagaaatgttaactatttggaaaataaacgccagcaaaaataaataaggcggccacagctcgctgcgaccgcccgttaacgccggcgccaacgcttactcttcgctgtcgccgcccgacgcccgcaccggcgcatccacttcgacgcgatcgatgcgctgcaggccgcgcggcagctgggtgcccttacggccgcgctccgcgcggaacttctgcagatcttccggacgcagcgtcagcttgcgtttgccgacgtgcagcgtgacggaggcctgcggcggcagcacgaacagccaggccagcttgtcttcaccggcggcggcctgcgccgccggaatggagacgatcttgttgcccttgcccttcgacagctgcggcagatcggcgaccgggaacatcagcatgcgcccggcggcggtgatcgacagcagcatatcgtctgcgccgtggatctccatcggcggcagcgctctggcgttgtccggcagcgtgatcatcaccttgccggcgcggttgcgcgccaccagatcgttgaaggtgcaaacgaaaccgtaaccggcgtctgaggccatcagcagtttttgatcgtcggccgccatcagcacctgctcaatggtggcgcccggcggcggcgtcagcttgccggtcaacggctcgccctgcccgcgcgccgatggcagcgtcatcggatcgagcgcatagctgcgcccggtagagtcgataaacaccaccggctggttgctcttgccgcgcgccgcgccgcggaagctgtcgccggccttgtagctcaaccctgccggatcgatgtcgtggcccttggcgctgcgcacccagcccatttccgacagcacgatggtcaccggctcggacggcacgaagtcgtgctcgctcatcgccttggcttccgcgcgctcggtcagcggcgaacggcgatcgtcgccgtaggtttgcgcgtcggcctggatctctttcttaatcagcgtattcagcttgcgctcggacgccagcagcgcctgcagttgatcgcgctctttcgccagctcgtcctgctcaccgcggatcttgacctcttccagcttggccaggtgacgcagtttcagctcgaggatcgcttccgcctgggtatcggagatgccgaaacgctgcatcagcaccggcttcggctcatcctcgctgcggatgatgtggatcacctcgtcgatattgaggaacgccaccagcaaaccttcgaggatatgcaaacgcttgagcaccttctcgaggcggtagttcaggcggcggcgcaccgtatcgcgacgataggccagccattcggtgaggatctccaccagccctttaacctgcgggcggttgtccagaccgatcatgttcatgttgatgcggtagctgcgttccagatcggtggtggcgaacaggtgattcatcacctgctccagatcgatgcggttggaacgcggcacgatcaccagacgcgtcggattttcgtggtcggattcatcgcgcagatcctcgaccatcggcagcttcttggcgcgcatctggctggcgatctgctccagcaccttggcgccggagacctgatgcggcaaggcggtgatcaccgcgctgccgtcctctttcttccacacggcgcgcatgcgcaccgagccgcggccgctctggtaaattttgcgaatttcatcgcgcggggtaatgatctcggcttcggtcgggaagtccggcccctgcacgaactcgagcaggtcatcgagcgaggcgcccggcttgtcgagcagcgccactgccgcagcggcgacctcgcgcacgttgtgcggcggaatgtcggtcgccatgccgaccgcgatgccggtggtgccgttcagcaggatgttcggcagacgcgccggcagcatcttcggctcttgcagcgtgccgtcaaagttcgggatccagtcgaccgtgccctggcccagttcggccagcaagacctcggcgtatttggacaggcgcgattcggtataacgcatcgccgcgaacgacttgggatcgtccggcgcaccccagttcccctggccgtccaccagcggatagcgatacgagaacggctgcgccatcagcaccatggcttcataacacgcgctgtcgccatgcgggtgatacttacccagcacgtcgcccacggtgcgggcggatttcttgaatttggcgctgttggtcagccccagctcagacatggcgtagatgatgcggcgttgtaccggcttcaaaccgtcgccaatgtacggcaacgcccgatccatgatgacgtacatggaatagttcagataggcgttttcagtgaatgtgtgcagcggtaaacgctctacaccgtcatgagtcagatcactcattactcaattatcctcagaccgtggcttggcaatcccttggacgacaaaaggcatcgcttgtcgattctgcccgcgatagtaacccatctgcggggtagctgtcacagttggcgcaaggatcgccggcgacggccgattgcgcgatgcggtttatgcaaaatttagctacctggcggcctctttattgactgacagtcaacactgttgtgcgctggatcgcatttttacttgcctgactcacgattacactcgtcaccagcgagatggtttccgccttttccgcgggaagcatgccatatcttaacactgacgggagccgcgaaagatgagcaatatcctgattatcaacgctaaaaaacaattcggccattccaacggcgaactcaaccaaaccctgagcgacgtggcggaaagcttcctgcgcgatctgcagcacgatgtgcaggtcaccgtggtcgacgacggctatgacatcgaagccgaagtacagaaatacctgtgggccgacgcgatcatctatcagatgccgggctggtggatgggcgaaccttggatcctgaaaaaatacatcgatgaagtgttcaccgccggtcacggcagcctgtatgccaacgacgggcgctctcgttctgacgaaagcaaaaaatatggctccggcggcctgatccagggcaaaaaatacctgctgagcctgacctggaacgccccgatggaggccttcaccgatcccgatcagttcttccacggcgtcggcgtcgacggcgtttacctgcacttccacaaggccaaccagttcctgggaatggaagcgctgccgacctttatctgcaataacgtgataaaacaaccggatatcgaagcggacatcgcacgttatcgcgagcatttggcgaaaatttttgcttaactgacgcagaacattctcatcaacgaggcagacatgatcaccgtaatcgcagaaatcaaagtgaaacccggccaccgcgccaccgtactgcaagccattgaaaaactggtgccgctggtgctggcggaagacggctgcggcgaatatacgccgatggtcgacagcaatacccaggccccctggcagaaacggtcgccggattcggtgttcatgctggagaaatgggaaagcatggcgcatctggaaaaacacctggccattgagcacatgctcaaacaccgcgagactatcaaggacagcgtgctggacaccgagatctacatcctggaaaacgccctgtaagctccgccttataacgtctgcgcgtcgatgtgcgcgctgacgtagtcaagaaaacaggtgatgcgcgccgccaattgcgtattgcggtaatacaccgcgttgatcggctggcgcacgtccagcgtctcctgctccagcaacgtcaccaacttgccggcttcccgatcgcgacgggtcataaagtctgccagctgtacgatcccctcgccctgcagcgccaattgccgcagcgtttcaccgctggacgcagagatcgtcggcgtgatggcgaaatgcggcgcctggcgatagcgcaacggccactggttcagcgactccggctgggtaaaaccgagcagacaatgccgatgcaactcctccacgctctgcggcgtgccgtgctgctgcagataagccgggctggcgaggatgcgcagccggctggcgcccagcgcgcgcgcatgaatggtcgaatcacgcaacgccccgatgcgaatggcaatatccgtgcgtttttccagcagatcgataatcaggttgtcggtgttcagctcgagcgaaatttgcggataacgttctctgaatcccgccaccagcggcacgatgacgtgctccataaaaggtgcggccgcattgatccgcagccgcccggcgggcatttgccggcgcaccgccatttgctcttcggcattttccaccgagctgatgatcgtacgcgcatggttcaggaagctcagcccctcttcggtcagctccaaacgacgcgtcgtgcggcgcatcagggtggtatcgagcttattctccaggcggctgagcgcgcggctgatgccggatgttgtctggccgagccgatcggcggcggcggtgatagaaccgctgtcgaccaccgaggtgaacgccagcaattcttcgagcgtgatcttcatgcattccggcccaggttatcgggcgccgcatgaacgccctgcgggaaagccggcccggcgtttcgccgggccagggtcaggctcagaccgccaattcggccatgtcgcccttgtcttgcagccagttgcggcgatcttccgaacgcttcttggccaacagcatgtccatcaccgccagcgtctgatcgacgtcatcttccgccaccgtcagttgcaccagacggcgggtgttcggatcgagggtggtttcgcgcagctgcagcgggttcatctcgcccagccctttaaagcgctgcacgttcggcttgcccttcttgcgcttcagctgttccagcacgccggctttctcttcttcatccagcgcgtagaacacttctttaccgagatcgatgcgatacagcggcggcatggcgacatagacgtggccgcctttcaccagcgaacggaagtggcgcacgaacagcgcgcacagcagcgtggcgatatgcaggccgtcggagtccgcatccgccaggatgcagattttgccgtagcgcaattggctgagatcttcgctgtccggatcgatgccgatcgccacggaaatgtcgtgcacttcctgcgaggccagcacttcgtccgaggacacttcccaggtattcaggatcttgcccttcagcggcatgatcgcctgatattcacgatcgcgcgcctgcttggccgatccgcccgccgaatccccttccaccaggaacagttcggtcatagccagatcctgcgaggtgcagtccgccagcttgcccggcagcgccggcccgctggtcagcttcttgcgcaccactttcttggcggcgcgcagacggcgctgggcgctggagatcgccagctcggccagctgttccgccgcctgaacgttctggttcagccacaggctgaaggcatctttcaccacgccggaaacgaaggccgcgcactgacgcgaggaaagacgctctttggtctgcccggcaaactgcggatcctgcatcttcaccgacagcacgtaggcgcagcgatcccagatatcttccgccgacagcttcacgccgcgcggcagaatattgcggaattcgcagaactcgcgcatcgcgtccagcagcccctgacgcaggccgttgacgtgggtgccgccctgcatggtcgggatcaggttgacgtagctttcggtcagcagctcgccgccttccggcagccacagcagcgcccagtccaccgcttcggtgtcaccggcgaagttgccgacgaacggcgcttccggcagggtgatcaggccgttaaccgcttccatcaggtagtcggtcaggccgtcctggtaacaccagcgctgctcggtgttgttcaccttatcgatgaaatagatctcgacgccggggcacagcactgctttggctttcagcaggtgagtcaggcgcgataccgagaaacgcgggctgtcgaagaactgttcgtcgggccagaagtgcacgctggtgccggtgttgcgtttgccgcaggtgccggtcaccgtcagatcttgcactttgtcgccgttttcgaaggcgatgctgtaaacgttgccgtcgcggcgcacgttgacttccacccgcttcgacagggcgttgaccaccgagatgcccacgccgtgcaggccgccggagaactggtagtttttattcgagaatttaccgccggcgtgcagccgacacaggatcaactcaaccgccggcacgccctcttccgggtggatgtccaccggcatgccgcggccgtcgtcgatcacttccagcgactgatcggcgtgcaggatcacgtcgatgcgcttggcgtggccggccaacgcttcgtcgacgctgttatcgatcacctcttggccgaggtggtttgggcgcgtcgtgtcggtatacatgccgggacgacggcgcactggttctagaccgctgagtacttcaatggcatcagcgttatagctggattgagtcatcgttgattattttttcgtggttaaagggaggtgccggaacggcccgtcagaccgcgtttagccctaaaaaatccacaatctgggggaagtagtgctcgaaaccgacgaaggcgtggtttccacccgactccaccgtttgccgacacgcggtgtaatacgccactgcctggccgtaatcgagaatttcatcgcccgtttgctgcagcagccagattaaatccggcgactccaaaggatcgatctgcatcactttcagatcgtaaacgtgccgagactctaacacatattgctggccggtgtaggggttctcgttggcgccgaggtagtcgaccagcagctcaaacggcttgaccgccgggttgaccaccaccgccggcagggaaaaacactgcgacagccaggtggcgtaatagccgcccagcgatgagccgaccagcccgagcgtttgcccggcgcgttccagcaccagattttccagcatctcggcggcctccgccggaaaggccggcagctgcggcaccaacatctcgatatcgggatggtgttcggccagccaggccttgaaggccaccgccttggccgactgcggcgagctgttgaaaccgtgcaggtagagcagtgtcgaaggcatcagtatccatccgagtccatatcggggcggaagtcgtcgttttccaggcggaacacctgcgtctcgacgcgaccgtccggcagcagatcgaggtagcgccagccgggggaaacgtcgtcaatggtgaagttcgtgcagtgcggcttgaattgcacgcaggtagacggcgtcgccaacaggcgccgcccctgccattccagatccagatcctggtgaatgtgcccgcacaccacggtattcactttcggataacgcagcaggatcgcgcccagcatatgcgggttgcgcaggctgtgctgatcgagccaggtgcaaccggacggcagcggatgatggtgcagcagcaacagcgtatagcgctcggggtgagcctgcaggcagcgctccatccactccagctggtattcgctcaactcgccgtgcggcacgccgaacacctggctgtccagcatcagcacctgccagttatcgcccagcagcacctgtttggaaggcgcgatgcccgcggcggccaatgcgtcgaccatcgccggttgaaaatcgtggttgcccggcagccacacgcagggagcaggcagttgcgcgatgccggcggcgaagtggcggtacgcctcttgcgaatgatcctgcgccaaatctcccgtggcgacgatcaaatcgacgtcgcggcgctgcgcctggatggcgtccagcaccgcgtgatagctgcgataggtattgatgccgagcaacgtctcgtgttcgccggcaaaaaggtgggtatctgttatttgtagaatcctgaccgcggccccactcgccacgggcagtttaaacaggctttccaaatggtgtcctttgttatttcagtctgtctaacaaaccggaaccgccatcgctccatgcgccaaacagtagcgcagccaatcagcaagaaactggttaatttgatgcttttcgtcgcgttgatgcaactttttattaggataatcataacgcgctttaaagcggtagatctgctgactggaacacacttccgcaaccatggcgtcatggtacaaccgcaccgtcatcgcgggcaggctccagtagctgaccgccggaaagatctgctcgatctccaccagcgacgtgtaacgcgtggactcaacgatggtcaaacgatagccggcgccgttcacctgataagtcaccgtttcgcccgcttcgtcgttgcgcggcagcaagcggcgcaattgcgcgaagttggtttcgcacaatctcatcatttcggggaaatcaggggtatagcgctgtttcattagttggcccactcttttcttaacgattcatggtgcaacgccagccattgcaatgcaatcactgatgcggcgttatcgatcgcgccttcctcaacccagcggtaagcctgttcgcggctgaccacatgaacgcggatatcttcatgttcttccgccaggccgtggatgccctcggcggtgccggcgtccacttcgccgaccatgatcgacaaacgttcgctggtgccgccggggctggccagatagctcagcaccggtttgcagcgcccgaccaccacgccggcctcctcctgcgcttcgcggcggcacacgtcctcgacgctttcaccggtttcgatcatacccgccaccatttccagcagccagggcgaattactggtatcgaccgcagcgatgcgcagttgttcaatcagcacaacctcgtcgcgcaccggatcgtagggcagcagcaccgccgcatggccgcgttcgaaaatttcacgcgtgatttcagggctcatttcgccattgaacaaccgatggcgaaaccggtataaattgagtgaaaaaaaaccacggtacagcgtctcgcgtgcaataatttctacatcttttttatcgaaagtaacgggcgatggctgcgaacggttcatgcgcgaattctcctgcttgagtatgccgataaaataaacggttttgatgacagaaacagcgggactctccgccgcggctttatgttaggctgtttttcgccgccggatgcggcacgtttgtgcgctcgcaggtaatagcgggaaacaatccggattgtcagccataatatcagctgcagtcgacccgggcagtacgccaaggtaaatgggcggtctgaaaggtaaaagttacgtgagatggcacattcagccacctgatgcgtacctcagactctgctagaatcggcaactatttcgtctatcgtcagcgctaacatagcaatattgctgcacaacaaggaatgcaaatgaagaaactgctcccccttcttatcggactgagcctgggcggcttcagtgcaatgagccaggcagagaacctgctgcaggtctacaaacaggccagggaaagtaacccggatctgcgcaaaagtgcagctgaccgcgacgccgcattcgaaaagatcaatgaagcgcgcagcccgttgctgccgcagctcggtttaaccgcaggttacgattacaccaacggctatcgtgacagcaatggcgttaacagcaacgtgaccagcggttcgttggcgctgacgcaaaccatcttcgacatgtcgaaatggcgccagctgacgctgcaggaaaagaccgccggcatctccgacgttaccttccagacagcggaacagcagcttattctcaacacggcgaccgcttacttcaacgtgctgaaagcgatcgatacgctgtcctatacccaggcgcagaaagacgcggtataccgcacgctggatcaaaccacccagcgcttcaacgtgggcctggtggcgatcaccgacgtgcagaacgcccgctcgaactatgacaccgtgctggcggcggaagtctccgcccgcaacgatctggacaacgcgttggaaacgctgcgtcaggtcaccggcaccttctaccctgagcttgcctcgctgaacaccgatcgcttcagcacccagcgcccggaagcggtgaacaacctgctgaaagaagcggaagcgcgcaacctgagcctgctgtccgcccgtctgagccaggatctggcgcgcgagcaaatccgcgcagcccaaaccggctatatgccgacgattgacgtcagcgcgtcaaccggcatcagcaataccaaatacaacggctccaataccggtggcgcgaatgccgcacgctacagcgactccgatgcgggccaaaataaggtcggcatcagcttcaacctgccgctgtacagcggcggcgcgaccaattcgcaggtgaaacaagcgcagtacggctttgtcggcgccagcgagcagttggaaagctcacaccgcagcgtggtgcagaccgttcgttcgtcgttcaacaacgttaacgcttcgatcagcagcatcaacgcctacaaacaggcggtgatctccgcgcaaagctccctggacgcgatggaagccggttatcaggtcggtacccgcaccatcgtcgacgtgctggacgccaccaccacgctgtataacgccaaacgtcagctgtccgacgcgcgttatacctatctgatcaaccagctgaacatcaagtcggcgctcggcacgctgaaccagaacgatctgctgctgctgaacggcgcgttgggcaagccggtatcgaccgcgcctgacgccgtcgcaccgcaaaaccgcgcgcaggacgcctatgcagacggctatcaggacaatgcgccgatgcaacagactgcggcgccagcgccggtggccactcgcgcatccgcgccggccgttaccaccagccaaccggctcgccacagcggcaacccattccgcaactgatgtccacacgctgacaaacacggggtccggcctgcgccgcgccccgttttttttgcctcgatttcgccacttctgcccgccgcctcacagccgccgctgcgccaggtgatatcatcgtcactctcgttttcgcagttggatgaggttcgatggacaacgattcacgttggcagcaactgattaacgacggcgaactgccgccgccgctgcgcccgacgccggcggtgtatgcctcctggctgcgctgccgcagcctgatgcagcctgatgtctggcaagcgccgcaccgcgcgcagggcgcgaccttcgaatcgatttgccgccgcaagaacgatctactgacgctcggccaggcggcgctggaagacgcctgcgaatacatggagccgcggcgttgcctgctgatgatcctcgacgagagcggctgcatgctgtggcgctgcggcgacgcccaaacctgggagactctgcagcaactgggattcgcccccggcgcttactgggccgagggacagatcggcaccaatgccccggcgctggcggcggcggaaggccacccggtgcgggtgagcggtgaagaacacgtgcgccgggcgctgcacggctggtcgttctgcgccacgccggtctacgacaacagcggccgccagcgcggctcgatcgccctgggttgcctgctggccgacagcgccgccggcgatctgtcgctgacgctggccatcgcccgcgaaataggcaactcgctgaacgccgacggcctgctggcggaatccaaccgccatctgaatcagctttacgggctgctggacggcgtggacgacggcgtgatggcctgggatcatcgcggctacctgcaatacatcaaccagcgcgccgccggcctgctaaaactggacgagcagcagagccagggcaaaccgctggcgcagttgctgacgctgcccgctctgctcaagcgcgccatcgccgatcggcaaccgctgcaacacatcgaagtcaccttcgaaagccagcggcaatttatcgccgccttgctgacgctcaagccgattttcgacggcgatcgctgcagtttcatcgccctgctgcacccgctcgaacggctgcgccaatatgtcagcagccagctggggcgcgtcagccacagcttcgagcagatgccctccgcctcgctggagatgcggcggctgatccgttacggccagcaggcggccaaaggccagcatccgatcctgctgcgcggggaggaaggcgtcggcaaagagctactcagccaggccatccacaacgccggcgaacgcgccgccgggccgtatatctccctcaactgccaactgctgccgcaggcgcaggggctgcgtgagctgctgggcagcgacgccagcgaagaagaggcgggccagctcagcaaatttgaattggccaacggcggtacgctgtacctcgaacagatcgaatacctgccggcggagatgcagtcggcgttgctgcaggtgctgaaaaccggcgtggtgatccgcctcaattccagccgggtgatcccggtcgatgtgcgggtgatcgccggcagcgccgccgatctgccgctgctggtgcagcaaaaccgcttccgccgccagctgttttacagcctgcaggcgttcgagatccagatcccgccgctgcgccagcggctgagcgatattccgctgctggtcaaacaccatttgcgcacgctggagcagcatttccagtgtcgctttcgggtggatgacgaagtgatggcccagctggctctctacctgtggccgggcaacgatttggagctgaaaggagtggtggagcgcgcggcgatgatttgccacggccaccacatccagctggcggatctgccggcgcacctgctcggccagccgtcgctgctggaaagcgatccgcagcccggcgcaccgctgttgacgctgacagacatggaacgccaggcgatcctgcgcgcagcgaccgtcagccgcggccagctgacggaaatggcgcagctgctgggcataggccgcaccacgctgtggcggaagatcaaacagcacgggatcgacatccgccagttcaagctgcgcgcctagtggctgagctgcaataccccgcgcgcggcgtccagcatcgccttctgcccgctgcgggttttgctcaggcaatcctgcatgccgaccaccatcggaatgcccatcgccttcgccaaaatggcgctgtgcgacagggcattgccgccactcagacagatgccgagcaccagccgcctgtcgagcatcaccacctccgaaggcatcagttcgtccatcaccaatattgacggttctgtcagcgcaataaccggcagcggcagcccctgcagatggcacagcgtgcggcgcagcatgtcgcgcacgtccagttcgcgcgcccgcatgtagtcgtcatccagctcgcggtactcttcggcgatcgcctccagcacctgtctccaggcctgctcggcgctgcacagctgttgcgcgatgcgggtgtaagccgcctgctgcagatccggatcgtccagcagcatgctgtgggcgccgaagatcgccgcctgcggcttgccgatcagcgtgccggtgcgttccgccagccggttcagatcgctcagcgtatgctgtagcgcctcccgcaggcgttgctgttcgcccaatacctcgtccgcgccgatgcgccgctcggacgtgggtggccagaagctgtaagcctggaacaccggcccgctggtgacgctttccgccaccggaataccgtgcagcgaaggctgctgccgctcggagaccgtctcgccaaaatgctgctccgccaacgctttgaacgccgccagcgcctcgtccgcctgcgcgccgtcggcgatcaaacggatggtgtcgccgtgacgcacctgcagcagcgccagctgattgaggctgcgcggatcgacgcactgcccctgcttttccagcaccagctcggccttgaacggcgccagcgtctcgaccagccgcgccgccgggcgcgcatgcaacccgtgcggattctgcaccgtccaggttgcgcttttgccctgcgccagcggcaaggccacggttttcgccgtaggtgaagcctcgcccagctgtgcctgtttgccctgcagcgccccctgcgcctccgctaccacctgctccagtgaggcgccggagttggcggcaaccaccgccgccagcgtgccttcaaccagcggcgccgcacacagccgcactttggcggccagatccgggtccagcagatcgagcgcggtttcggcactgagcagcgcgctgcccagatccatcagcaccagaacgccatcgccgtcggcgaccgcttcgatcgcctccatcactttgaccgcgtcggtgccgatcgggtgctgctcgtcatccacacccgccgccagcgctagtttgcagccgtcgccgcgcatcatctgccgcgccaactgctcaacgccgcgcgccagcaacgcgctgtgcgaaaccaccacgatattaatcatctcgcctcctgctaactgccggcgacctcggccagcgttttcatcatcaacatcaccgaagtggcgccgggatcctggtggccgatgctgcgctcgcccaggtaactggcccgccccttgcgcgcctgcatggtgatggtgctctccaccgcccgctcggcgctgtcggcggcgcgctgcagcgcctccgccacgctcaggttctgctgcgcggactggccgaggctttccaccaccggccaccagacgtcgcacatggtcttgtcgcccggctccgctttgccgcgcatcaccacgccttcaaccccttcctgcatcacctgatgcagctccgtcagatccaggctttgcttggcgttcgccgcctgcgccgcgcggatgaagaaggtgccgaacagcggaccgctggcgccccccacgctcgacagcagcgtcatgccggtgtttttcaggataaaaccgatgtctttgtccgccaccgacggcagtttttccaccaccttattgaaaccgcgattcatgttcaaaccgtggtcggcatcaccgatctcggtgtccaactgggtcagaaaatcgcgctcccggctgaacacctcgccgcaacgcatcagccaatcgacaacctgttgtttggtcaacgccatgattcctcctcagcaaccccaacgcagcgcaggcgttttcaccggcgcatcccacaaggacaacagctcgtcgtccacgttcaacaacgtgatggataccccctgcatatccagcgaggtgcaataagaacccaccaggttgcgttcaatgatgatgcccgcctcggcgcagcgctccgccagccgatggtacacgccatacaactcagacaatggcgtggcgcccagattgttgaccagcgcgatcacccgatcgccgcgcgtcagcggctgcttggtctgcatctcgtcgcgccactcgccctgctgacgatcccagacgcggatcgcgcgctgatagtggccgtggtcgatcaacgtatggaacatgtcgtccaccgccgcgttgagcgtggtgaacgggcggcgcgcaatgcctggctcgccgtgaatgccgacgccgaactccatttcgttctccgccagggtgaacgacggcttgccggcggccggcacggtacaggcgcccaacgcaatgccgattgaatgcccgtggttgttgatgcgatgccccagcgtcaccacgctgtccagatcgtcgccgcgcgccgcggcggcgcccaacagtttctccatcagcacggtgttggccaccccgcgccgcccggcggtaaacaggctgtctttgaccgccacgtcgtcatccaccagcaccgtcgccaccgcgacgccgctgtcgtgcagcagctcggtggcggtttcgaagttgagcacgtcgccggtgtagttcttgatcagcagcagcaccccggcgccgccgtcgatcgcctgaccgcactcgtacattttatccggcgtcggcgaggtgaaaatctcgcccggacaggcgccgtcgagcatcccttcaccgacgaagccgcagtgcatcggctcatggccgctgccgccgccggacaggatcgccactttgcccgccaccggcgcgtcggcgcgggtcacgaacaccggatccgcgtgcaccagcagctcgggatgagcctccgccagcccctgcaactgctcttccaacaccgactcgacctgattaatcagttttttcacgatggtttcctctgtaagaacaggggcgcggcgcaccgcgccccaacggtatcaatgacgctgcaaccaggcggcgcccagcctatccgccgtcaggatcgccgcctgcacgcccgcaggggtgaccttgaacggcatgttgtgaatggtttcacccgcggcgcagctggcctcggccaccgccatcatcttcgccgtcgcatcgccggtgacgcccatctgcgccagcgtgatcggcaagccgatgtcatgacaaaacgccagcacggtttcaatctgcgccatcgggctgttctgcagcaccagttgcgccagggtgccgaacgccactttctcgccgtgatacaggtggtgacactcctccagcacggtgaaaccgttgtgaatggcatgcgccgccgccagcccgctgctctcgaagccgatgccgctcagatacgtattggcctcaatgatgcgttccaccgcttccgtcaccacgccggcctcgaccgccagtttggcttttaccccttcggccagcagggtgtcgtagcacagccgcgccagactgagcgccgccagcgtcgatttgccgccggccatgctggtggcctgcgcgtcgaagcaggcctgcgcttcgaaataggtggagagcgcgtcgcccatgccggctaccagcaggcgcaccggcgctttggcgatgatggcgctgtccatcactaccatgtccgggttgcgcgggtagatcaggtattcagcaaattcgccctgttcggtgtagataaccgacagcgcgctggtcggcgcatcggtggaggcgatggtgggaatgagcaccaccggcagccgttggtagtgggcgacggccttggcggtgtcgagcgtcttgccaccgccgacgccgatcaccccgcggcagccgtgggtctgcagctcgcggccaaggcggtctatctctttacggcagcactcgccgttgaagcgggccgcatgatgtttcacgccgtgctgctgcagactgcccatcagggtgtcgcccgccagctgcatcacaaagtcgtcagcgatcacgaaataatggtcggcgagggatttggcgtattcgccgacggcggacagcgcattggcgccctgaatgtatttgcctggtgactggatgattctcaacataaccggatccttgtagggagttggcgatggtaacgttcagatatcaggtgatgacgcgccggcttcgccgccggcttgttgttgtgcttcgactatgagcgcctgtcgcccgcctggcgagtcacgcgatttttgttccattatggaacatcatcatagcgacaacgtttcatgatgaaacgctaacgcgcgttttttcgccgcgaaagcgaactggcgcacaccccaacgtataactgcgtaaagagtggattctgcgggcgtttcagctttaattttgaccatgtttcccctatccttagcgccactactgggaaagggcgaaaacagcccgcatgatgggattgataacgatgaaacggacaaaaaacatcaaccaagagacgttccgcaaatcctggcgcagctaccgtgtcgcgcccgtggccttggcgatcagcgccgtctttatgctggccggctgcgagaagagcgatgaaacggtctccctgtatcagaatgccgatgactgttcgcgcgccaatccttcgatgagcgagcagtgcaccacctcctacaacaatgccctgaaagaagcggcgaaaaccgcgccgaaatacgccactcgcgaagactgcgtcgccgagttcggcgaagcgcagtgtacccaggctccggcacaggccggcatggcggcggagtcacaaagcagcggcagcttctggatgccgctgatggcgggctacatgatgggccgcctgatgggcggttccggcttcgcgcagcagccgctgttcacctccaagaatgccgccagcccggcgaacggcaagtttgtcgacgccagcggcaagagctacggcccggccaccgccggcggccgcaccatgacggtgccgaaaactgccatggcgccgaagcctgcggtcaccaataccgttacccgcggtggcttcggcgagaccgtggccaagcagaccagcatgcagcgcagcagtgccacctccaactccggctctcgcagcatgggcggttgatgcatgaaacgtattgctattactgagcgcccggactggcgtgaaaaagcgaccgagttcggttttcgtttccacaccatgtacggcgagccgtactggtgtgaagacgcctattaccagttcacgctggcgcagattgaagagatcgaaagcgccaccgccgagctgcatcagatgtgcctgcaggtggtggagaaagtggtcggcagcgacgagctgatggccaagttctgcatcccgaaacacacctgggagttcgtgcgcagctcctggcgcaccaaccagccgtcgctgtattcgcgtctcgatctcgcctacgacggcatcaacccgccgaagctgctggagaacaacgccgatacgccgacctcgctgtatgaagcggccttcttccagtggctgtggctggaagatcagatcaatgccggcaagctggatccgcaatcggatcagtacaacagcctgcaggagaagctgatcgagcgtttcgccgagctgaaagcgcatcacggcttcggcctgctgcacctggcctgctgccaggacagcgaagaagatcgcggcacggtgcaatatctgcaggactgcgcgcaggaagccggtctgccgaccgagttcctgttcatggaagagattggccttggcgagaaaggtcaattcaccgatctgcaggatcaggtgatcggcaacctgttcaagctctatccgtgggaattcatgctgcgcgagatgttctccaccaagctggaagacgccggcgtgcgttggctggagccggcctggaaaagcatcatctccaacaaggcgctgctgccgctgctgtgggaaatgttcccgaaccaccctaacctgctgccggcttatttcgcgcaagacgatcatccgccgatggatcattacgtcaccaaaccgctgttctcgcgcgaaggcgccaatatccagatcgtcgaaaacggtcaggaagtggcgcgcgtcgatgggccgtacggcgaagaaggtatgatcgtgcagcagttccatccgctgccgaagttcgaagacagctacacgctgatcggcagctggctggtgaacgatcagccctgcggcatcggcctgcgcgaagatcgcgaactgatcacgcaggatctgtcgcgcttctatccgcacaccatcctcggctgatcgctccactgaaggtaaaaacgccagtctctgactggcgttttttctttagcccacctgcaccgacagcatgctaagcgcccccatttcgataccgtcgatcggcacgctgatggcctcttttccatcccagctgccgagcacatacagcaacggcagatagtgttccggcgtcggattcgacagcgccgccccctcatggcgcatgaaatccaccagcggatggttatcgccccgataacgcaggttatcccggacaaagttattgaatgattccgcccacgggtaggcgctggtatcgccctgccatttcaccatgcgcaggttgtgcaccacgttgccgctggcgacgatcatcacgccctcgtcccgcagcgcggcgagtttgcggcccagctcatagtgataggccgccggctgcgtgccgtcgaggctaagctgcaccaccggaatgtcagcatcgggatacatcttgatcaggacaccccaggtgccgtgatccaatccccactcgccgagatccgccgttaccggcaccggcgccagaatttgctgcagctgcgcggccagcgcgggagagcccggcgccggatagcgggtatcaaacagcgcctgcgggaacccgccaaagtcgtgaatggttttgggtttttccatcgcggtgaccgcagtgccgcgggtataccaatgcgcggaaaccgccacgatcgccttcgggcgcggcaatgactcacccaacgcacgccatgcccgggtgtaacggttgtcttccagcacgttcatcgggctaccgtggccaagaaacagtgccggcatacgagaggtgttcatagagggatccttagttcaaattgtgctatgccgctacattacgcgctttgccgcagcaacacagccggataaccgtgatgaagatattcaataaatttgaattaaaaagcgcaaaaatgcaccggccaacagaaagttaaaaaacagatacttttcaattaattaataaattccgtgaataccatggcattactgccacacagatctaatttgtgaacaatttatgtattttttgttaacacattcgatacactcctctgtcagtcgacagggtgttggcaacccgtcggcgctacgggaatcacgtctcaccaaggaggaattcatgttcagactcacccgcctgacgctttccatattcttactcgccggctggacggcaagcaccggcgcggcggacaacgcgcagctgacgcagcgcgaagatccttacttccttcaggcgcaaactcagttgcaacagcggctgaagcaaacgccaaacaccaaccgcgccaaaaacgtcattctggtcgtcggtgacggcatggggttttccaccgtgaccgccgcccgcatttttgaagggcagcagcgcggcgtggatggcgaatccaacgtgctggcctgggaggccttcccctatctggcggcggccaaaacctattccgccgacgcccagatcaccgactctgcgcccagcgcggtagcgatgaccaccggcgtcaaaaccatcaacgatctgatgggcctcaaccatacggctaccctcaacaactgcgaggatcagcaaaccaaggccgtcaccacgctgtgggagatggccgcaacgctcggcatgtccaccggcgccgtgacgaccgcgaccattacccacgccacgccgggcgccacctatgcccatatcgccaatcgcgactgggagtctgacgccaaaatgccggcggatgccctggccgcaggctgccgcgacatcgcgcgccagctggtggaaatgaagtacggcaacggcctgaacgtagcgatgggcggcgggcgcgccaactttctgcccgacagcgtgagcgatccggaatatcccggcaagaaaggcgccagaaaggacggccgcgacctgacgcaggtctggatgcaacgctacggcgagcgtgggcaatacgtctggaatcaggcgcagttcgacaaaatcgatccgaccaaagtcgaccacctgttggccctgttcgaaccgtcgcacatgaacttcgagcacgatcggcggcaagacgcggcgggagagccttcgctggcggaaatgaccggcaaggccatcgatattctgtccaggaatcccgaaggctacctgctgttggtggagggcgggcgcgtcgatcacggcagccataacggcaatgcctaccgcacgctgagcgacgcggtcgcgctgaacgaagcggtgaaaaccattgtcgacaaggtcaatctggacgacacgctggtgatcgtgaccggcgatcacagccacacgctgaccatcgccggctatgccaagcgcggcaatcctatcctcggcatttccgtcggcgtcgacggcaaaccacggctgggcagcgacggcaagccctacaccaccgtcggcttcgccaacggccccggcggcacaatcccgctgaccgagcgcccggcattaaccatggaacaggccaccgcgcccgactttattcagccggcgctggtgccgctgaacagcgagacgcacggcggggaagatctcggcatctacgccatcggcccctgggcccatctgttccagggcacggtggaggagaactacaccttccatgtgatgaattacgccagccgcatcggcgaacgcctgtcaaaacgctagccacaaaaaaagccgctttacgcggcttttttatcgttgaaagcggccggcgatcagctggcttttttctcgtgcgcctggcggtaggccaccagatcttcgatggtcagcaccaccatgtcgtgctgtttggcgaaggtaatcacttccggcgcatgcgccatgctgccatcgtcgttggtcagttcacacagcacgccggcgggtttgaaaccggccatggaaaccagatcgatggtcgcttcggtgtggccgcggcggctcagcacgccgcccggctgcgcgcgcagcgggaacacgtggcccggacggttcaggtcgctcggcttggcgctgtctgccaccgccgcacggatggtggtcaggcgatcggaagcggaaaccccggtggtcacgccctgcgccgcttcgatggtcacggtgaaggcggtctggaactggctggagttgttggtcaccatcatcggcagctcaagctgctgacggcgttcttcggtgatgcacaggcacacgatgccgctgccgtggcgaatagtcagcgccatctgctcaacggtcatggtttccgcggcgaagatcatgtcaccttcgttttcacggttttcatcatcgagcaccattacgccgcgcccgttgcgcagtgcgtcgatcgcgcgttcaacgcgttctgttggcgtgccgaagtctgaaagtagcgtctgattcatggtaaaaaacctcattaaaaattatggattaccagaaccagggcgatcttgaggagtagctagcaatagctaaaaaaataacgcaagcgggcgcatgcccggcagataccgttactctctcccatccggactataaccgtcggccccggaattacaccggatctgctgacctctaaccggcctttacaggctggctgagcgctcgcgggctttcaccgtagaaggtgatttaccgccggtggggactttcaccccgccctgagaataagcaagatgactataacgctaatgggtagacagggcaattggcaaaagcacaattcggccacgtgcggcgaatgcgcttaatggtttatccggcgggcaactcgcattacactaagcggcagctattaaactctgaaagggatacgccatgattgacccgaaaaaaatcgaacaaatcgcacgccaggttcatgagtccatgcctaaaggcgttcgtgaattcggggaagacgttgagaaaaaaatccgtcaggtgctgcagtcgcagctgacccgtctggatttggttaaccgcgaagagttcgacgtgcagactcaggtgctgttgcgcacccgcgagaagctggcgctgttggagcagcgcatggccgagctggaaagcaagctgagcgcggcgccggccgccaagcaggaagacgaataattcccgccaagggcgcgcaccgcgcgcccttgttctttagattgcccggcgttagccgcgcccgtctttgatcgctttgatgatgttggtggtcgacaggccgtcttcaaagttcagcactttgacatcgccgccgttggcccacacttccgcactgccggcaatctcttccggcttgtaatcgccgcctttcaccagcagatccggcaagatgtcggcgatcaagcgctgcggcgtgtcctcctcgaacggcaccacccaatccaccgcttccagcgcgcccagcacaatcatgcggttctccagcgcgttgaccgggcgtttttcccctttcagacgcttggtcgaggcgtcgctgttcaccgccacgatcaggcgatcgcccagtttgcgggcgttggccagataggagacgtggccggcatgcagaatgtcgaagatgccgttggtcatcaccactttctcaccgcgctgacgcgcctgcgccacggcgtttttcaactgtgcttcggtcatcacgccaaagccggtttcggcgcggccgcgcaccgcgttttccagctcgatcggcgacacggtagacgtaccgagcttgcccaccaccacgccggcggcggcgttagccaggaagcaggactcttccagcgaattgccggcggccagcgaggcggccaatacgccgatcacggtgtcgccggcgccggtcacatcgaacacttcctgtgcctgggtcggcaagtgcagtggctcaacgccaggctgcagcagcgtcatgccgtgttcggagcgggtaaccagcagcgccgacagctcgaaatccgccaccagcttcatgccgcgttccaccagttccgcttcatccttacagtggcccaccaccgcttcgaactcggacaggttcggcgtcagcagcgtcgcgccgcgatagcgctcgaaatcggagcctttcggatcgatcaacaccggcaccttggcggcgcgcgccagttggatcatgccctgcacctggctgagcgcacccttggcgtaatcggacagcaccagcgcgccgatctgcggcagcgcctgctgaatgcgctccagcatcggctgcggatcaacgttggagaagccttcttcgaagtcgagacggatcagttgctggttgcgcgacagtacgcgcagcttggtaatggtcggatgggtcggcaccgagacgaagtcgcagcgcacgttgacttcattcagcttggcgctcagcgcccgcgccgcatcgtcgatgccggtcaggcccaccagacgggaagtggcgcccagcgaagcgatgttcatcgccacgttagccgcgccgccgggacgctcttcgatggtatcgaccttgaccaccggcaccggggcttccggtgaaatgcggctggtcggcccataccaatagcgatccaacatgacgtcaccgaccaccagcacaccggcgcggcgaaaatcaggcagcgtaactttcatccgataactccaaaaaagaacaaaattttagtggcgcagatattaccacagaccgccggaatacccgcaaaaaggtattaatccagccatttggcccagctggcgcgcacctgctcgcgctcggcggcaaacagctcgctgccgaccttgccggaatgttcctgcagcgccaggtggtggatctcgtcgcgcatggtgacataagcctgggtcagcgcacgcgcctcctcttccggcatgatgtcgtaattggccatcagctcgaagatacgcacgttgtccgaccaacgcgtcaggcgcggttcacccggcgcatagcgtaagaccagatattgggcgataaattcgatgtcggtaatgccgccctcatcggttttgatatcaaacagatcgcgctgtttgttgccgagatggttgcgcatcttttcgcgcatctcgcgcacttcacgcttcagcacctgcgcatcgcgcgttttgcacaggatctcgcgccggatcgcgtcgaactgctgatgcagcgccggatcgccgtgcacgatgcgcgcgcgcaccagggcctgatgctcccaggtccaggcttcgttttgctggtagtcggcgaatgcctcgacggtgctgaccaacatccccgcggcgccggaaggccgcaggcgcgcgtccacctcatacagaatgccggaggaggtgcgggtgctgaacagatgcatcacccgctgcgccagccgcaggtagaactggcggccgtcgatgcagcgatcgccgtcggtcatcacctccggcgggcaatccaacaggaatactagatcgagatcggaactgtaccccagctcccagccgcccagtttgccatagccgattaccgcaaagccgcgcccctcccgctcctgcaaatgggtgggctggccgtagcgcgccaccatgtcgctccaggcctgttgcaccaccgcgtcgatgatcgcctcagccagataagtcaggtgatcgctcactttcatcaccggcagcgccccggcgatatccgccgcggcgatgcgcagctgctgcgcctgtttgaactggcgtagcgcctccagcttttgctcttcatcgtcttccggcacccgcagcaggtactgacgcagctcgctgcggtaggcgtccagcgccaccggctgatacagcgtggccggatccagcagttcgtccagcaacagcgggtaacgcgacagctggttggcgaccatcggcgacgcggcgcacaggcggatcagatggctgagcgccgcatggtactccaccagcaactcgaggtaggtggtgcgggtgacgatgctgagcagcagctgcgccagccgcaccagcgcggtcggggcgtcctggcgcgggcatacctccgccagcaggcgcggcatcagctgatcgagcacgtcgcggccgcgcgggccgatggtgcgcttgtcgacgtcgtggcggaaatcggcgatggtgcgcagcatctgtcggcgcccctcttcgtcgaggtgcggcgtcagcggtgccagctcgttctcctccagcgcgtcctgccacaggctgtggtagtgctggtagtcgggatcttcaccgacatccgggctatcgtcgccgatcaggtcgtcgaacaccgcgcgcaccgcctgcatatgcacctccagcgccgccatcagcgccggccaatccgccaaccccatgccgtaggccaaccgcacctgatcgagcgcctcctgcggcagcgtctgggtttgctgatcgccaatcgcctgcagcaggttctccagccgccgcaggaacaggtaggcggcgctcagcgcccgcacctgctcactttccagcagccccagctcacccaccgcctgcaacgtcggcaacagcgaacgcccctgcaacgccggttcacggccgccgcggatcagctggaatacctgagtgatgaattcgatttcgcgaatgccgccggcgcccagcttgatgttgtccttcaggccgcgccgccgcacttcacgggcgatcatgcccttcatgttgcgcagagactgaatgacgctgaaatcgatgtagcggcggaacacgaacggccgcagcgttttgcgcagctcctggctgtaggcgtcttccgccccgcccatcaggcgcgcctttaccatcgcatagcgctcccaatcgcgcccctgttcctggtagtaatcctccagcgccgcaaagctcatcaccaacgggccgctgtcgccgaacggccgcagccgcatgtccacgcgatagacgaagccatcgatggtctgttgatccaacgccttgatcagccgttggccgaggcgggtgaagaactgggcgttatccagctcgcgtcgcccgccctgggtttgaccattttccgggtaagcgaagatcagatcgatgtccgatgagaagttcagttcgccgccgcccagcttacccatgccgaggatcaacagcggctgcggctcgccggcggcgttgcacggcgtgccccattcgcggcagcaggtttgatacagccagtcgcgcgcgctgacgatcagcgtctccgccagcccgctcagctgcagcaacgtttcttcggtcgaacacagcccctgcgcctgcgcccaggcgatgcgcaccagcgtttcgcggcgaaacagacgcagcgtgcgcatcagctgcgcttcgtcgcgcacctcttccagctcgtcctggagccaggcggcatagtgttgccactcaccgggcgccggcggctgttcgcgcagcgttgccagccaggccggctgggcgagcagcgcgtcgctgacgaaatcgctcgacgccagcacccactgctcctgctcgctaaaggcgcagtccgcgccgtgaacttcctgaaaacgctgcacaacctgctgtgcctgagcctgtaacgcggctgaaagtggcgacatagtgtatgacccgttctgcggcccacggctggcgggccggctggattaacgaagcgcgccgtttaaccagaatggcgcatgcgataaggcctgtttgcggctggcttcataccagccctggcggcgctcgctcagcgccgcctgcagctcacgccaggcgtcgatataaggcccggtctgctcgtcggggtaagcgcccgacagcaggaccagcgccgaaatctgacgcgtcaggcgcggcaattgttcctgatattcatcttcgttcagcgtacggctgaaggcctctttcagctccgcgccgctgcgccccagcatgatgtcgctgaagcgtttgaaagaaccgtccagcttggcctgcgctttggcgtcgataaacggccgccaggcgccgcgcaccaaccatgatgtgagcgccaacttacattgcaggtagaccgcgctgtaacacagggtctccggttgcgcggttttgtccgccaacagcggttcgagctcggtcaggcgggcgcgcagatcggcactggccttgcgcggcaccaggccgccgaagatcaccagcgcctggcggatcgtgccaaccgcctcaatcaccgaagcgcgcgcctgcgcgtcgccgcgcagccacagctcttcatggtactgccagtggttgagcgccagctcgaaggcggcgatcatcccctgctccacggtcgccttcgccgccggcttcagcacccgcagcgggcgcacctcacgcggcggattgccctgcgccaggtggtaaccgcgcgccgccttgctcaggctgccctgacgcagcccgtcgtgcgccgccagctcaccggccaacgccagcagatcggcggtattgcctttcagcagctccagttctatctcgctcagggcttcgctgaggccaccagcacgcacttctccctgatccaggccaatctctatctcgctttggccgtaagtaaccacccacttctcacgcacgaaatccgtacggaacagcggttgcaacgcctgctgcagcgccgcgatatcgcaatcctgcggccagatgtcggcaggaaactgcgccaacgccagctgcggctcggcgatagcgacattgtattccgggcgctggtgcaggccgcccaccactttaccggcggttttgatggtcatctcatagcgatcgtcgaaaccgcgaatgcgcagccccatgtcgtgactgcgcaggaagttgtcggccgtttcgaagtaaatgttggtcagcttttgcggcgcggaatgctgatgcggccaggcggcgagccagtgtggcagagcggccaccgcttgcggcgcggcgatgaatttcagttcaatttcaacggtcataattctttaacaccaataagttacgcattcgcgtcggtttcagcgcggcgcgctcggcccgccgtatgctgcccactgacgcacagttgccgttatcttaccgcgattcccggcgccttaaccctgctaactgtagaaaaaacctgttacgttataaaacgctgcgcaactcacagaatcagccacagtaagatagttctcattccggttttggcgttgcgtcgtcagactgaaccctctactatcgttccataaattcacccagaaacgatgaactaatgcagaaattacgcctgattttccttgccgcgctgagcttcagcatcacttgggccgcacatgccgaagataaacgctatatctccgatgagttaagcacttacgtccatagcggcccaggtaatcagtaccgtattgtcggcactctgaacgccggtgaagaagtgaccctgctgagcgtcaacgacagcaccaactacggccagatccgcgatccgaaaggccgcaccacctggatcccgctcgaccaactcagccagacgccaagcctgcgcacccgcgtgccggagctggaacagcaggtgaaaaccctgaccgacaagctcgccaacatcgacaacacctggaaccagcgcacggcggaaatgcaggaaaaagtcgcaggcagcgacagcaccatcagcagcctgcagaaggaaaaccaggatctgaaaaaccagctggtggtcgcgcagaagaaggtcaacgccgttaacctgcagctcgacgacaagcagcgcaccattatcctgcaatggttcatgtacggcggcggcgtcgccggcgtcggtttgctgctgggtctgctgttgccgcacctgatcccgcgtcgcaagaacaacaatcgctggatgaactgatctcagtatcgttcagtttgagtttgggcgcctgcgggcgcctttttcattggcgccgacatcccgcggccaattcatgtaatctgatagacagagccttacacgatattcaggagtcaacagtgcagatttatctggtcggcggcgccgttcgcgacagcctgctcaacattccggtggtcgatcatgattgggtggtggtgggcgccacgccggcggagctgctggcgttgggctaccagcaggtcggcaaagattttccggtgttcctcaatcccgatacccacgaggagtacgcgctggcgcgcaccgagcgcaaatccggccaggggtacaccggttttacctgctatgccgcgccggacgtcacgctggaagaagatctgctgcggcgcgatctgaccctcaacgccatcgcccgttccgccgaaggggaactgattgacccctacggcggcgtggccgatctgcaggcgcgcgtgctgcgccacgtttccgacgcgttcggcgaagatccgctgcgcgtgctgcgcgtggcgcgattcaatgctcgcttcgcccatctgggttttcgcatcgccgacgaaacgctggccttgatgcgccggatggcgcacagcggtgaactggccgcgctgaccgccgaacgcgtctggaaggaaaccgaaaaggcgctgcaaagccagagcccgcaggtctattttcaggtgctgcgcgactgcgatgcgctggcggtgctgttcccggaaatcgacgcgctgttcggcgtgccggcccccgccaagtggcatccggagatcgacaccggcgtgcatacgctgatggcgctggcgatggccgcccgcctcactcccgaggtggacgtacgcttcgccaccctgtgtcatgacctcggcaaaggattgacgccaaaagagttctggccgcatcaccacggccacggcccggcgggcgtgcggctggtcgaagcgctatgccaacggctgcgggtgcccaatccggtgcgcgatctgagcaagctggtggccgagtaccatgatttgatccacaccgtgaacaagctgcggccggagaccctgctgaagctgttcgacgccatcgacgtctggcgcaagccccaaaggctggagcagatgatcctgaccagcgaagcggacgcgcgcggccgcaccggctttgaggagaatccttatccgcagggcgactatctgcgccaggcgtatcaggtggcgaacgcggtatctattaaagaggtggtagccagcgggctgcagggcaccgcgatccgcgatgagttcaaacgccgtcgccagcaggcgctggccgactggaagctcaaccaaaccatcctcaacgatcaggcataaaaaaaccccgcagagcggggttttttcttgccatcgggcttacaggaataccatgtaaaccacggccgccacgataaagcggtagatggcaaacggcacgaacgagatgcgtttgatcagcgacaggaaggtcttgatcgcaatcagcgccaccacgaaggcagtaacgaaaccgacggcgaacatcggcagatcaccccaggtcaggaagtgcaggctcttgtacagatccagaccgctggcgccaatcatcatcggcaccgccaggatgaaggagaactcggacgccgcatagcggtttacgcccaccagcataccgccggcgatagtggaccccgaacgggagaaacccggccacagcgccaggcactggaagcagccgatcatgaacgcctggcggtaggtgatgtcatccagcccttccgctctcggtgtcttcggcttcagccattccgccgccagcaacagcaggccgccgacaaccaacgcgtacatcacgtttttcggcgcgaacagcgatttaatcacatcgtggaataccagacccagcaccaccgccgggatcatcgccagcaggatatgccccagcttcagctggccgctggttttgccctcgtgctccaccggcttgccgccgaaatggatgccgatcaaaccgaacaaccggcgccagaacatcacgacaacggccaggatcgaccccaactggataatgacttcaaaggttttggctttgtcgccggtaaaacccagccactcgccaacgataatcatatgcccggtggaagaaaccggcaaaaattcggttaacccttcgacaaccccaagaacaaacgcaataaacagtgaatgcatgtcagccatgtgcttcgctcaccccataaaataacggccatcacataaaaaagcggcagtgcttaaaagacaatgccgctaaaacaattctcaggattaagaccagattaacggtctttcgttgcaagcagatgacataaaatcatgcgggacgagtgccgcgctcaatgatcacgccgacccgattggcatgtgctacagcgcccggtttgctgaccttaatacggacccacggggaattgaagcgctgaagcaaaatttcggatatttcctccgccacgcgctccaccagcgcgaaccggttcgattcaacatgctggatcacggcgtcgctgacatcggcatagctcagacagtcatttacatcgtcgctggcggcggccggccggttatcccagcccatttcgatatcgaacaccagcttctgacgaatgccctgttcccactcataaacgccaatggtggtaattacggtaagctcttcaataaatacgatatccatcacgtcattctctgtttttggccttgccggataccacttccagcggaatgtgcgtattatccatagatgttgcgagtaaaacgaccattattaaacggaaccgcgttatgagtgctaccgcgcttggcatgattatcttcgcgtatctgtgcggctcgatttccagcgcgatcctggtttgccggatcgccaggctgccggatccgcgtgaacatggctcaggaaaccccggggcgaccaacgtcctgcgcatcggcggccggctggcggcggcggcggcggtgctggtgttcgatattctgaaagggatgctgccggtctggctggcctacaaactcgatgtgccgccgctgtatctgggcctgacggcgatcgccgcctgtctggggcacatctatccggtgttcttccacttccgcggcggtaaaggcgtggcgacggcgtttggcgccatcgcgcctatcggctgggatctgaccggcctgatgaccggcacctggctgttgacggtgctgctcagcggctactcttcgctcggcgccatcgtcagcgcgttgatcgccccgttctacgtctggtggttcaaaccgcagttcaccttcccggtagcgatgctctcctgcctgatcctgatgcggcatcacgacaatattcagcgcctgtggcgcggccaggaaggcaagatctggggcaagttccgcaagaagaaaaacgacgcggataacggcgaccagccgagagaggaataacagaagggccggataatccggccctttgctttataccgcaggcagttccgccagcggccagcgcggccgcaccgaaacgctcagcgccgggttggcgccgctcttcaggcgcaccatgccggcataggcgatcatcgcgccgttgtcggtgcaaaattcagggcgggcatagaacacctccccgccgcgtttctgcatcatctccgccagtttggcgcgcagcgtgcggttggcgctcacgccgccggccatcaccaggcgtttgaagccggtctgctccagcgcgcgtttgcatttgatcgccagcgtatccaccaccgcatcctcgaaggcgcgggcgatgtcggcacgcgtctgatcgtcgttgccgttggagcgaatggtgttggcggcaaaggttttcagcccggagaaactgaagtccagccccggacgatcggtcatcggccgcgggaaggtgaagcgccccgccgtgccctgctgcgccatcttcgacagcatcggcccgccgggataatccaggccgagcagcttggcggttttgtcgaacgcttcgccggcggcatcgtcgatcgactcgcccagcagttcatactcaccgatgccggtgacgctgatcagttgagtgtggccgccggagaccagcagcgcgacgaacgggaacgcgggcgggttgtcttccagcatcggcgccagcaggtggccttccatatggtgcaccggcactgccggcacgttccaggcgaacgccagcgcgcgccccacggttgcgccgaccagcagcgcccccaccaggcccggcccggcggtataagccacgccgtcaatatcggccggggtcaggttggcctctttcagcgccgcctgaatcagcggcacggttttgcgcacgtgatcgcgggaggccagttccggcaccacgccgccgtagtcggcgtgcagcttcacctggctgtataattggttggccaacaaaccggtttgatcgtcatacactgcaattccggtttcatcgcaggacgtttctatacccagtactcgcattacatttcccatcattcacgtgcggccgccagtctaccacattccgccgcatttaccgccggtgcggcgcatcttgtcaccggcttgcgcctatgtcgatgattcatccagaaaatgcctgagcgattaaacacgagcatttttttctgattagtctataatcagcgcccggtgcaaaattgcgcacgttgcggcagagcgacgcgggtttcaatttgctgtgatgctttacaaagcagcatccattggagtaaaattccgcaccattttgaaaaggctggcgcttggccagcaacaaaccgaattttattgaggtgagaggcacatgccggtaattaaagtacgtgaaaacgagccatttgacgttgctctgcgtcgtttcaaacgctcttgcgaaaaagcaggtgttttagctgaagttcgtcgtcgtgagttttatgaaaaaccaactaccgaacgtaaacgcgctaaagcttctgctgtgaaacgtcacgcgaagaaactggctcgcgaaaacgcacgccgcactcgtctgtattaattcttcgggggcaaccccaccgcgtgaatttctgattttcaaaatcgcgcagaccgagtagttgcatacgaaggccgtgctttccgaaaggaatgcgcggcttgttctcgtttataggctaatgaagtaagggcttatggctggacgaattccgcgcgtatttatcaatgacttgctggctcgcaccgacatcgtcgatttgatcgacgcccgcgtgaagctcaagaagcaaggcaagaactatcacgcgtgctgtccgttccaccacgaaaagacgccttcctttaccgttaatggcgaaaagcagttttatcactgttttgggtgtggtgcgcacggcaacgccgtcgactttttgatgaattacgaccgactcgagtttgtcgaaaccatcgaagaactggcgaccatgcacgggctggaagtgccttacgaagcgggcaccgggccaacccagatcgaacgccatcagcgccagagcctgtaccaactgatggaacagctcagcgcgttctatcaacagtcactgcagcagtcctccggggcgccggcgcgcaactatttgcagcagcgcgggttaagtgacgacgttattcgccatttcgccatcggcttcgcgccggcgggatgggacaacgccctgaagcgtttcggccgcgacgccgactcgcgccgcgcattgaacgatgccggcatgctggtgactaacgatcaggggcgttcatacgaccgtttccgcgaacgggtgatgttccccatccgcgacaagcgcgggcgcgtgatcgccttcggcggccgcgtgctgggcgacggtatgccgaaatacctgaactcgccggaaaccgaagttttccataagggccgccagctgtacggcctgtatgaagcacagcagaaccaccctaccctgcagcggctgctggtggtggaagggtatatggacgtggtggcattggcgcaattcggcatcgattatgccgtcgcctcgctcggaacctcgacgacggcggaacacattcagctgttgttccgcgccaccgacaacgtcgtctgctgttacgacggcgaccgcgccggccgcgaagcggcctggcgggcgctggaaaccgcgctgccgtacctgaatgacgggcgccagctgcggttcatgtttttgcccgacggcgaagatccggacacgctggtgcgcaaggagggcaaagaagccttcgaacagcgaatggagcaggcgcagccgctgtccacgttcctgttcgaaagcctgctgccgcaggtggatttaagcagcccggacgggcgcgccaagctgagcacgctggcgctgccgctgattactcaggtgccgggcgaaacgttgcgcttgtacctgcgccaggagctcggcaacaagctggggctactggacgacagccagctcgacaagctgatgcccaagcaggctgaaaatgcgaatccttatcaggcgccccagctaaaacgcacaaccatgcgtatactgatagggttactggtgcaaaatccgcagttggctacacttatcccttcgctggaagggttggagcagaccaaacaggcgggattgccgctgttcgtcgaactggtgcagacctgtttggcgcagccgggcctgacgaccgggcaattgctggagctgtatcgcgacaacaaattcagccagcagcttgaaaccttggcgacctggaaccatatgatcgttgaggacatggtcgagcagacctttttggatacattggccagcctgtacgactcggtgctcgagcaacggctggaaacgctgatcgcccaggccagaacgcgcggtctaagcgcggaggaacgtgaagaagtccgttctctcaaccaggttttagcgaagaaaaactgaataccaaacggcttaagtgccgataattgcgagggcagagccctgcacagtgccgccatagtgggccgcggcgataacgaaaacgccccaaatgctattgttggcggtttcgccgaccgacaccaacctaaatactctgaagtgtggataccgtcttatggagcaaaacccgcagtcacagctgaagctacttgtcacccgtggtaaggagcaaggctatctgacctatgctgaggtcaatgaccatctgccggaagatatcgtcgactccgatcagatcgaagacatcatccagatgattaacgacatgggcatccaggtgatggaagaagcaccggacgccgatgacctgctgctcgccgaaaactcgaacagcacggacgaagatgcggaagaagccgccgcacaggttctgtccagcgtggaatccgaaatcggccgcaccaccgacccggtgcgcatgtacatgcgcgaaatgggtaccgtcgaactgctgacgcgcgaaggcgaaatcgacatcgccaagcgcatcgaagacggcatcaaccaggtacagtgctcggttgccgaatacccggaagccatcacctacctgcttgagcagtacgatcgcgtcgaagcgggtgaagcgcgcctgtccgatctgatcaccggcttcgtcgatcctaacgcggaagaggacatcgccccaaccgccactcacatcggttctgaactgtcgagcgaagagcaagacgacgacgaagaagatgaagacgacgaagacgacgacaccgaagacgacaacagcatcgatcctgagctggcgcgtcagaagttcgccgagttgcgcgatcagtatgaagcgacccgcctggtgatcaagaaaaacggccgcagccacgccagcgccgcggacgagatcctgaagctgtctgaagtgttcaagcagttccgcctggtgccgaaacagttcgacttcctggtcaacagcatgcgcaccatgatggaccgcgttcgcacccaggaacgcatcatcatgaagctgtgcgttgaacagtgcaaaatgccgaagaaaaacttcgtcaccctgttcgccggcaacgaaaccagcgattcctggttcgaagcggcgctggcgatggccaagccatggtcggaaaagctgaaagacgttgctgaagacgtgcagcgcagcctgcagaaactgcgtcagatcgaagaagaaaccggtctgaccatcgagcaggtcaaagacatcaaccgtcgcatgtcgatcggtgaagcgaaagctcgccgcgctaagaaagagatggttgaggccaacctgcgtctggttatttctatcgccaagaaatacaccaaccgcggcctgcagttcctggatctgatccaggaaggcaacatcggcctgatgaaagcggtagacaagttcgaataccgccgcggctacaagttctcgacgtacgccacctggtggatccgtcaggctatcacccgctccatcgccgaccaggcgcgcaccatccgtattccggtgcatatgattgagaccatcaacaagctcaaccgtatttcgcgccagatgctgcaagagatgggccgcgagccgacgccggaagagctggccgagcgcatgctgatgccggaagacaagatccgcaaagtgctgaagatcgccaaagagccaatctcgatggaaacgccgatcggcgacgacgaagattcgcatctgggcgacttcatcgaggataccaccctcgagctgccgctggattccgcgacctctgaaagcctgcgttccgccacccacgacgtgctggccggcctgaccgcgcgcgaagcgaaagtgctgcgcatgcgtttcggcatcgacatgaacaccgaccacacgctggaagaggttggcaagcagtttgacgttacccgtgagcgtattcgtcagatcgaagccaaggcgctgcgcaagctgcgtcacccaagccgctccgaagtgctgcgcagcttcctggacgattaagtccggctgccgcacccaaaacaaaaaccccggcctgccggggtttttttatgcctcagaacatgctgttgccgctggcggtcttctccggcaccggctgcgtcacgtcccagtgttcaacaatctttccggcgctgtccagacggaagatatcgacgatcgccgcggtcttgccggcctcgcgcccgctgacctccacatgcaaaatcacgaagtcgccgtcgacgaacgcctgtttcacctcactgtgcgaattggggtaacgcgttttcagcagctcgacaaattgacgaaaacccgccacgccgtctttggcgttggggttatgctgtttgtactgttcgcccaaaaacggccgcgccgccgcaaaatccttgttgttcagcccctgtcgataaaactccagcacgttctgcttgttacgcgcttcctgcggcgaatgccccgcctgtgcggcgccggtcaccaacagcagcgccatcaaacagcctttcatcatcgatgtcatcgcacactccccttatctcattgcagcgccaggaacagctcacgatagctggcggtcagttgctccaacgtggcgcgattcaatccgctgggattgggcaatacccacacctcggtttcccccagcataagcgtctgcttgccccagggcgcgtttttcaccccaaaggcggtggtgaacgcctgcttgcccagaatcgccagcgcacgcggctgatagcgcaggatcttctcttgcagcgcctcaccgccgctgcgcaactcgtcgcgcgacagctcgctggccgccaccgtcgggcgcgccaccagcgcggtaatgccgcagccattatccttcagctgctgccactgctccggcgccagctggctcttggtaaagccggcctgatggatcaccttccagaagcggttgctgccgttggcgaaaggatagccctgatgggcggaagaaaggccggggttgatgccgcaaaacaccacccgcaggttgggcgccagaagttccatgagtatcgtgagtccattgcagggatttactgcggttatcgcaaaatccgccagcaattacaacaggctagaactgcgcagaaaagcaacatacgggcgggtaacagtagaccgatgcttaaggattccctataatctcgcggcttggccccttagctcagtggttagagcaggcgactcataatcgcttggtcgttggttcaaacccaacaggggccaccaaatttttgcttatacaacagcatgttaagccacctctccagaggtggctttttactttcagatagctagtacctcaaaattgcctcaccagtaaaggcaacagccccacgcaaggcacgcacctcgatgattttcggctcaaaaggatattgtgtaatggccttgaaaaagtgcaaagaatgtaaacatgaggtttcgacatcggcccaaacttgcccacactgcggagctaaaaccagcttagtcattaaattcgcagaaactgcgcttgggataataggtctggctattatcatccctattctttatctgattttcttcagctgagcagatgcaaaaaacgaaacattacgattttcaggtataaaaaaacccgcatatagcgggttatctctctaagccgatcacatccacataacctgttgctgtcctgccacactggcaccaacaggatgcggcggaactgcgtcaactctcccaggtgtcattatcgcgcattgatatgtttccatcgttttgaacgtgtggccgcaattgatgttttggcactgatgataacgctctttcgtttgttggctcagatagcggctggtgcgggcatgggccgccgttcggcaaagcgggcaatgaaacatgtttaattcctcgtcactggctcaattgccgcgataataccgctcgcgatcggaaacaaaagtaactttaagctaatttacaattataaaattaacctcaagctacatcataagtcacatccgatagcaaaacctcaaactccagcgccgtcgtaaagccgctattgctgagattgtgtgtgactttgctcactatccagtcttgcgcatcgatcgccgctttaaacccgctgacgcgtaccggcgtttccggcgtgatgttggcacgccccatggctagcgacagcgagaactccgccacaccgcgctgaagcttttcccacttcgcctgtgctgcccgcatcgcggcggccttggtggcgtaaattttggtgatcgcaaacacgttatcgtcagcccccaccagataatcgcctttcgctgcctccgccggtttccccggttttttactgctacccggtttcgccttcgggtgttgcagcgcgcgcaaatgctgctcttttggcttgcgctgcagcttcactttcttcggcttcggctgttttgtattgagccagctcgccgttacgccggtgtaggcatcccgatcggcaatgctgaaactgtgctgatcgccatcctgccgggtgattgtatacaccggcaatggcttcccgcctaccgtgacgccgttccccggtcgcaacaacagcagagcgccatttttcaccgccgccactgcgccgttgagcgttgcaagtcgggtaataaatgccgcgtccgtctcctgcgtctggtcgatatggctgattttgatggtgcccagaccggcggccagcgaggctttcagcttattacgcgcagccacctgctgcacgatgtcgcccagggtggtgtcgtggtaggactcatcgcgccgggtgttcagcgagccgcgaaaatccgcactacgcgcgcgaatagtcaacgtgtccggcgcgccccggtgttcgacctcatcgaccgtaaactggccttttggcgtcaatggcgagccttgccagccgagcgccagcgacagcaccgcattgcgctgaggcatcgccatcagtccgtcgctgtcgtccagttcgatgtcgagctggtcggcctcaaagccccggttatccgtcagtgataaagaaatcagccgcttgcggatgttctgcgtgatgtcgttatcctgcagcaacagcgagaaatccggggcaactcgcgccccggctggcaggcttacgccggtgatcatgataacaaccctcccatagcaccggcggccttcccggccatctctccggctttatcgtacagttccccggcctgctggcgcagatcgccaaacatcgcagacagggactcatcgacccgcttcaggttgagcgtgaactctgtgcgacgcgggctgccgtcggcgaaaaactcggaatgcgtttcagaaatcgactcgatcacaaacatgccgtaaatcgtaccggttccctcaataagcggccacgcccggccctgctcggccatcagttgcagcgtcagcagtgaccagcgtccgccggtgatctccggcaacagcaccccggacagcgtgattttttcctcatccatccccagaaattgcgctgccgggcgcaggccaacgcgggcgttgctcggccagcgatattccgcgttgcggctcatggactgatacggcagcgtctgcagcataaaaacaaacagccccagcgttaacatcatcatgaatctccgtaagtcatgcggctacgcgcggcggccgcgtgtttgcgtcgttcggcctcgagctggcgcgatacttcgcgcgcaatggaggccgcgtcttggccgggggcgccgtacacctgaatcgtgatcggggctggcgccgtggcaggtgcagcagccggggccgacgccatcaccggcgttgacagcgataacatcgccgccgacagcgccgccgttttccggcgcccggtgacgttggccgggccgttgactatttccgggccacgctcgccgacgatgccgaactggccgcgcgggatgatgccgcccttgtcgaatgcccccgcatagcccggccccggcatcagctcaggcgccgggcgattgtatgaaatcgacgggttaacctccgcctcatcgtcgccaaacttcatccagtcaggcagcatatccgtgaggctggaaaacttatctttcagcgcctgccagcgctcgctaatgccgtccatgatgccgttaatcatgttcatcccggcttctttgaacttgctcggcaacgccttggcggttccaacaagatcatcccattggcccgtcagccatgccttgaggttttcccatgcttcccttgtcgcttgtttaacgttttcccacgcctccgccgtcgcggcagtaatcccagcccatgcccccagggtggcattttttatcgtttcccagaccgcctggaactttggccccagcgtttcccagttctgccagatgtaaacggccgccatggcaatcaagccaatcaccgccagaatggggttagccatcatgatgcggcccagccacatcaccgccgttcccacaaagcgcagtccctttaccagaccgacaaacgacaaacgcccagcgattgacatcagtttgagcataccgccgcccatcgttagcagggcgcggcccaccacgccgccggtaaacttcatcacggtgccaagcccacgggcggcgccgatcagtcccttaaacgaaaacttagcggcaactccgctcagcctaaacagccctttggttaggtttagtgttggccccattaacaaactaaaaccggtgattactggcccggccagaaaccccagaattgccattccgccgatcactgccgtaagcgccagcaccagcttaaacagcgtgccggacaactccgggttatcctttgcccactgaccagcgacgccaagccattttgttgcactttgggtgagtttcctcagcccggagtcctgtttatcgaacacctcgatctgaatatcctcaaaggcagaggacatattttttaaatcaccgtcgaggttatccgttttcgtcttggcaatcttttctgttgcccctttggagtccgttaccgtctgttttttcgcgtctaatttgccgtttccggcggcgtcaatcagcttgatcgcccccttcattgcctcttcgccgaaaatgactttcaggtattcggcctgctgcgcggtgccgagcttgtgctttttaaacgacctgtcgattcttttcaggatgccctcaatcggcagcatgttccctttgccgtccttggtctttacgcccaattctgacagcgcatcagccgcctgcccgacaggcgcctgtaaccgcgtaaacatcgcgctggccgccgtaccggccatagaccccttgatgccgttatcggccaacacgcccagcaaagcggtagtgtcctcgatactggccccggccgcttcggcgatcggcgcgacgtatttcatcgcctcgccaaagtccatcaggttgctgttcgaactggtgaatcctttggtcatcacgtccgcgacgcgctggatctcaccgatcggcatgttaaacgccgactgcatgttggtgatgatgtcggccgcatcggcgatgtccagatctgaggccagcgccagatttaccgttgattctgtcgatttcagaatggcatcgccgttaaaaccggacttggcgagcaccgattgcgtgcgggcgacgtccgtcggcgaaaacgcggtcgtggcgccaatatcccgcgcctgctgacgaatggcggccaactgctggtcgttcttcgccagtcctagcgtggcctgcgtatctgacatctgtttgtcaaattgcacgcccggcatcataaagcggctttctgcatatcctgccgccgtggcaacacccaacccgacggcactctgattacggactgttgcccccaaggccttccccgcctgcgcgcgttgctgaatgcggctcagtgattcctgtttttgactcaggcgctccagctcgccgcgctggcggcccagcgctgtcgtggcttcactggcgctggccttcaatcggcgctgttcggcgctcaggttccgggtagcgatgccgtcagcgttgagcgcgtcacgctgtcgctgcaccgactggcgcaggccgttgtatttcgtttgcagctcggcggcggcgcgctttgatgcctccagcaagcgcgcttgctgcgccgtgggcttttccgtcgccttgaactggacggccagcgcggccgcctcttccttagctttcttcagtgccctgccggtaacagcgagctgtccctgcgccttgcgaaacccgtcaatccgggcgctttgcgcgtccaaaaccttgagggtttgctgcgtggttttgatgtcagcggccagtgatttactggcctgttggatactctttagcgggcgggtggcttggtctacggccttcagcagcacctgtagctgcaggcttttactcatcgtgattaactccgctgcgttgtagtgccttgtggcgccagttcaacagctccgtgagcgtcattccggccatttcagacggcggccagtggaagatcaccgcgatgtccgccatcaggtcatcaacgcccagccgggcgtcgtggattacgccgccgagttcggcgacaaaaaaccgaccactttcccagccagcgccaccaagtccggcagctcaaggcgcgcgcattcttcttttgtcaggttcggcacggtcacacgcggcagcacaaccagcagcgcgtcaacgtcggcgttggcgatcgccgccagcccgacgccgcgcagcgcgcccgcgttcggtttaatcacctgcacatcggtgatggtggtttcaccacgctggatcggggtgtcgagggtaacggtattttcttttgcgtctttcattgtgttctctcaaatcatggggaaaagggccagcccggcgggctggcgcaaaaattacaggccgatcgccttgcgatgctcggccagccggtcaacgccgttgacattttcgaccatgttcacggtatcgacctcgatcagctctttgccgtccacggtcagcttgaagtaagtacactcggtggaaaccttggtttcggtgtcctcgccctgtttgtactcgccaaagtcaatttctttgtggcgaccacgcatcaccacttccacagcggacacctcgccggtgtcgtcacgctggaatgagccggcaaagcgcagcggcacggcatcgacggcgccccactgtttcaacaccagctcatcaatgccgcccatcgaccattcaacggccagcgcgtcatcgtccagccccatatcgatggaggccgcaccgttcatgccaccgccccggtatttctccagcttgcgggtgagcttcggcagcgtcagcgaggacaccacgcccatgtagctgtagccgtcgttgaacaggttcaggtatttcagttttttcggcagtgccatgttctaacgtctcctttagcggttcacggatgccgcaaacgtcgcaagatagcgatcggtgatgcgctggcgcagggttaaatcttccagcggtggcaccggcgtgtagtcgtaatcgataaacagctttcccgccttcagggttgcgacagtgttggcgctttcgtcgtaccaacaagtgccgtcgataatcagccctgcggatttcagctcgcggaatttcgcgttgataccgtcaatcatgtcgcgcaccagcgtaggcgttaccgggcggtcaacagcccataggtgcgcctcggccatggtatcggccagcacctgcgcggtgcgagtgtagttctcgaacaggaacaacggatcatcggaacaggtgcgggaaccccagaatttaaagccgtctttgcggatcaacgtggtgacgcacgcttggtttaacaggtcggcatcggtgccgggcgcctgcaaatcccagaacacgctggcggtgatgccggtcacgccgttaacaccgacgtttgaaagcgtcttatgccagccggtttccgtgtcgattttggcacgcaggcccagcgcgcgggcggtggcataggcgatgtcgctctggttggcggtggtgttccagctgacaaaatccggccagatcagcatcagctcgcgctggctgaaattgtcgcggtacttaatcgcctcttgcacggtcttgcagccgtaggcactgatatagccgaacgcgcgcaactgcaggcaaatcccggccagcgccgtcgcgacctcctgattatccagccccggcacgccgaggatgcgcggcttaacgcccagctcagcctgtgcagataacagcgctttcatgccggtgtaacggccttcagcgttcgcgccgccgatgatgttggaggtggtttccgcagcgtctttgccggtggcaacgcgaacaaccacagtgaccggcttcgcctgttcggcgatcgcccgcagcgacgccgccagcgtgccttttttaccggccttgccggaggcggccagcacatcggtgataagtaccggggtatcgagcgggaaaaccgacgcgtcggcatcctccgccgtgcagaccatgccgacgattgccgtcgatacggtggaaataacgcgggtgccgtcgttgatttcgacgacgcgcacgccgtgatgataatcgcccattaatttgctccgggtggtgagtaggtgcaggcatgatgacgcccggcgcgccgggccgcacgcggtgggtgctggaaggccgaccagacaacaggccgggccggattgggggattttggagggaataacgatcgctcgcgccgatcaataacgctgtattgatctatgcaatcaattggacggattttatccgggcggggtaatgtcgaaaggtagatgcggcaacatcagggaataccgcaaatacaaaagcccgcatcgctgcgggcttttttcttaggcgccgggcgccaccggccagtcaatatccggggctgacatatcaagacgattcagcgtcacacggtattttttccagtccgccaacagcgctttttctgcctcggtcgccatatccaaatcaacagcatcctgaagcggcgcaatagccgcgcccgctatcgccagcaattcattttttctggcttcagccctcgccatcttttcttctgcggaataggcgcgcgggctcaccttcttaccgtcaaagacccactcaccattagccagacagcgctttggcagtttcgttgtgttcagctcaataaccgataagccaatcggccacagcatcgacacatcgctgttaatcgcgcagataatgccgctttcgtcataagccagttttacggtgtccggcgaaaacaatttttgcgcggcgtaccagtcaataccgttatcatcctgaagataaatcacgttctcgccgaggaataattcttccggcgtgtatcgcttcaaattcttaatgtgttgcattttacaccgttccaattgttgcccatgtgccgttaatcagcacctgaaccgctgaataagcgccccagattgaggggttgtagtttgagccggacatacccgtataaacacagcccgacggtaaatcgatgcgcccgccggtatccgcaataaccgtgcgcccggccatgcgcacaccctgaaccaaattctgataggcccagttctgcgcattgttctgcgcagccgagatattttgattaagccagttgctgaggtatccgccccatgctgacccctgtacgtttccgtccggatgccacgttgtcccgctggatgtggtgatcgcaggccatttaccgccgatatgaatacccgactcaaaagcggcggcgccggttctgacatccacagagaacggacgcagggcgttgaatgtgccgtattggtcattttcgtttgtcagcagcagataaagccggttgccgtcattgcgccagaaggaaccgaacccgccgccgaccatgcgataattatcaatatgggtagattggatctccgcgctggcctttagcgttccggttaactgcccgccggtcttcgcaagatagcggccatctgcttcggttttattccaggcattaacgtcaccggccaacaaattgacatcagcggacaacggcttaccgttcaccttgatagagcgcagcgcgtatttctgcgcggcttgcgcgtcggtcagcgcgccaatatcagcagccgttggcttgtagtgtgtcgtgtacacctgcgcccaagctttagccgtcgccggattatcttcccgaggagaacgtagccaaaactccgtattacccgagccgatcgcaaattggacatgccggtatttgttgagtttgaacgtcatcaaattaccgagattccctttagtcagtggatagccgactgatttatcgccgagctgttcaagggtgaaaccgtccggccgtgtgaggtcgctgtcggcgtttgtggcctgcaagctttcgctggggaaaaccactcgcggcaacgcaagcgccccggtcatggtgtcgcccgcccgtttcacatagcgcccgtcggcttcggttttattccatgcgttgacatcaccggccaacagattgacatctccgctcaacggtttgccgttcaccttgatagaacgcagcgcgtatttctgcatagcttgcgcatccgtcaacgcacctgtttcttgcgcggtaggcggtttcgccgtcgtataaatacgtgggtttgccccctgattaggctcagttccccaatgcaactcgttatccatccccaaaccaagacgcatcagtgccttcccggcgacttggaaaccgattgataaattactctgtgctgaagggcggctcatgaccaacggcgtatgctggtttccctcaatattcagtgagtccccatccgtttcagcgttgccgggcttaatagccagttttttaaccgtgccgccggacagcatcagaaaacggccatcggcttcggttttactccatgcaccgacatcggcggccgttggtttgtaatccgtggtgtaaatccgtgaccacaccaccccattttccggccggttagaacggccaataaagccgtgccccaaccccgacacgctgacatagcccgttgagggtgcggcatcgcaaggcaagctcagcaccccggcggcaatatttccagcgatcggcggcttgttctcagaggtcgcattcagccggtaaatttgcgcagtgttgcaataagcgttatcgaaagcccgcgcacccgcgcccagaccaaacgcaccgacctccatcaactgcccgccatccaccccgacgtttttcgtcgcggccgtacctaacgccagattgccacgcgcggcggccttgtctggcaagtcggacagattggcggcctttttcatgctggcatcgctgaccgttttaagcgccttcggcgtgctggctttcgtttcgtcggtactggttgtcgcgctgctcaactgtaccagccctttcgctatggtgctggcatccgggtgattgcgggttttctcatgcgcggcgatcgcctcagccacaaattcttttgtcgccagcacggtgtcatcaccggcgatcacctgaatcgcttcggaactgctgacaatcaaaatcatgcgcagcgtctgcgtgcggccgctgccttctgccagcttcggcttgtagctctccgccatattgctgacggcaatcagcgtcccggcctcgtcatagaggcccatttcacgcagccagaagccgccgacgttcgccggaataatcatttcggccagaatgtgatttttcactgccttatcaatagtcagcccattgagcgccgcacggcatttctcattgacgagcgttgtttgtgccgggttaggtgtcggcagcgtgccgtttccgtcgccgacggccatagagacgattttcaactgcgtgccgcccgcgctggcggcggcaatcttggccgccccggcggtggtaataatcgctttgtatttgctcatggttttctcttatccggggtaaacggtaatgacatcgccatcaatagcggccgcgccggtgtaaatccggccggggatgtcctgcaaaatgttgaggccgatcaggtggcggctcaggggcttggcgtcggcgataaggcgctccatttcctgatacatttcctcggtgatgccggtttcaagtacgccaatatccagccggaacgtgccgggcggatctgcgccgtcggtgtggaaccattcgataacgttgatcaggtagccgagcggctccaccacgcggcgcacggcgccgatggtgcccttgtgccggtgaatgtagaacgcagccgaaaccacgccccgcttcacgtcctccggccacgcctcatcccagcgatcgacagagaacgcccacgccagatagggcagcagatgcaccgggcaggttttcgggttccacaaatcacgcaggggaaccggcacgcgctccagctcggcacacgcggcagcggccgcaacctccagcggtgatgagccgacaggcaataagcggttagtcatcggcgcgccccggtgtgattttcacgccggtgcagtaacccgcctgcgttttatccagcacgatgtcggtggtcggttgagcaacctcaacacgttcaacaccttctacggtcagcgctgcgatgatgccggagcgccggatactgcggcctaagcggcgcatggtcagcacataattttgcaaacgttgtttcgcctccgtgaggatcggcgcaacctccgggccgggatagagaaacagcgtggcatcaatgccatagcgggttattttggccgcttgcacgatgacacgatcggcaaccgggcgcacatcctcatcattcagcgcatcgcggacaacctgcaacaattcagggctggcggtgccgtcgccgtcccgtgacaacacggtgacggtcacgttagccggtgatgggctgattgctgtcacatcagccacccggccatcggccgagcgggcgtgaaaacgataggaaccggccgatcccgctgtgctcatgccttcgaaagcatcctgcaggcgcaggcggtaatcttcatccgcttccatgattgccggtgtcggcggaatggtgctctcatccgccgggacgatcaccagtcgcggcgtgttgaagttttcgccgagctggtcgaggtcttcgccggtggaatatgccagcatcaccgctttggcggcatcattgacgcgctggcgtaaaatcacctcgcggtaggcgttctcctgcagcaacttaacgatcggctccgactccagcgccagcgtgcgcgcgacggcctcccgctgttcctccgggtaaagcgaaatcagcgtcgccttacgctctgccaaaatgtcttcataatccagcacctcaacgacgatcggcgcgggcagttggcttaaatcgatagttgccatggtttcagctcacaggaacagacagcgacagcgcgccgggggcatcggtgcgggtgccggtgatgtcgatcaccatcttgccgtcataggtggtattaaaagcaatgccggtcagcttgacgcgcggctcccacgccaaaatcgcgctatagcaggcggccataatctgcaggcgcagcgcgtcgttctgcggctggtcgagcagctcagagagcaacgagccataatcacggcgcatcgggcgcgaaccctgcggcgtgatcaagatgtccgccacggactggcgaatatgctcgatgtccgtcagcgtgcggccggtgcatcggttcatgccgatatatttggcgctgttcatgacagcagcagcccgataaacaggaaccagccccagccggacactccattaagagccagcatgacagcacccgataaggcaatcgcagcacccaatcgagaaacaagagcggccaaaattactgatagggttttcatacaggtgtcctcatgagggttcatcggttctcccgccgccgatctggacgccgccgtgggtgtgcgtatcaacaacaactccgttggatgagaacgagccgccgctatgctcaatgttcccgcgcatcgccccgcctttttgcacgtccagcgtgccggtggtgagcttgttggtgcagaccacctccggcgcatcgagcgtgattttgtcagccttaacgatcaccactttggtgctggcggtgatggactccgacgcctgcacgtcagcggttttaatgccggacacgctcagcgcgccggtttccggttcatactcgatgaccgcgccatccggaaacgcgatatgcagcgcatccgccgacgcagacggggccgggaagtcgtcagagaaaatgccgcacagtacaaacgcggtatcgagttcgccacccagcgcaaagatcagcacctgctcaccgaccgagggcgccgaccagctgcgagtacgcccggcgcgacaggttagccagttgagccagtcggtaagattgccgccggtttcgacgcggcacaggccgttatcaaggtcaacggtgctcacggtgccgatgcggatcaggttgcgcagcaggcgcaaaatgtcgtgttgattgttcatgctggaaggatgccgcccggcgcgggcggcgacaacgcgatgaggttggaagatcggaggcacaacagggggttattctgtgaggtgttctatcacggccgtttctatgattttgacgtcatccgggccaaatcccagtaacggacgggcctcatattttaccgcctcgctgtgcggcgtcggccgatcgcgcaggccgtaatggtgaacgtttaccatgcgtttcacacgcccgacaaactcaaccacggccgcatcgctgttgccctgggctttcagatagcgggccgtgcgcagcttggagaacatcgcccgatcgcgcagacgctttttgctgcgaagccgcgttttgcgcggcgcgtaaggtgtaccgtccggcgcctgctggcgtttgatgtgttgctgttgaccggcgcgcagtcgctttgacacggcaacggccagcgacttacgcgactgcggcgacagcttggcaatcagcccggccagccgggtgtcaaaggggttaagctcgctcatgccattcactcactaattcgccgtgaacaaagagctgcatcggccgcgtcacgtcctccggtaacggcggctccggcaggtgctcaacatgcaacgcgccatcgccttgctcgagcaccaaaacacgttcggtcagctgcagcgacacgctgaaatcgtaagagccgttgttgttaaagtcgctcgcaaaggtgatcccggtgcggcgcttttcctccgttgccatgatgtccggctggttttcccgtagccatgcctgaaccggcaccatgattaaatccagatcgccggtatagtccaaaaacagcaggttcagcgtatagcggtactcatgggacagcgagacggcaagcgtggcggccacattgccgcgctctacccgaacttgcaggttttcagggttgcgctgtagccacggcaggcagcgtgtcagctcagcgcggagctgttgcggttttaacatcgtgttgttcctgacagtgttttatcgtttcgacctgcaccgcgcaggccgccaaggcgttttcaagctggcgaatatcggcgctcagatcgccgttagtcgccgggcggctggccgggatttggcacggactcactttcggacagccaacgtagataatccgcggcgccggtgaagccggggcgctggtgcagccgggcaacgtcagcaggcaaagcagtgttaaaccaatcgcgtaattgctgattttcattgagtagcctctgtattttctgctcgcgcgtcagtgccagccggtgcgcggcgtttaggtcgccccttaacttttcctcttcctgcgccagcacacctgccgccgcctgcagcgtgtcgatcgccgcgcgggtatcggtcagcgccgccgcaatccggccgttctcctgccgggcgctttccagccgttcccccaacgtgacaacctgccatttcatccaaccggcgacgaccagcgccagcaccagaaaccagccgatcgcgcggctcatggcgcggccccgatcaggcagtgggccagctccgccgcccggcgccgttccagccccggcgatttgacgccgttgacgaacacccagcgcggcaactgctggcacgcgttgcgccagtcctgccgcttgatgaaaccggccagcgtagagccgcaagcggccgtgacgccgacgttaaaggcaaaggacaccaccgcgtcataaaccggcggcggcatcgtgacaggcatacagcggcctatgccgcgctccacgcgatacacgtcggcgacgaggttaacggcagcttggcgctcgctgataaccgcgccgggctttaccccggccgtgtggccgatgccgcttgtccagacgcccgcctgacactggtaaggggataaacgacagccctcgaaatcggccagcagtcgcaacccggcctcagagatctgcagtgcgctgaattgcggcagcagcaccgccagcgccagcacggcggccacgctgcagcgtttagcgattgagttcatcgtaaaccctccggctaacgcctagcttgttcaacagctggtagcttttgcggcggtagtaccagttaacgaggaacgtcccaacgccaacggcggcgccgaccataaaggcgatgtcctgcggactgtatcggccaatccaagcgagaaaggccgctacggtataggccacccacgacgtaattttctccattgctaatcccataaattgacggtttcacgctgcggcgcggcggtcacgtccggcagctctaccgggtggccgtggggcaatattgccccagcagcggccagcccttcatttagcgaataaacctgctcaaccacgccctgcgtgcgcccgtagtagcgccagcaaatcgcgtcaacggtgtcgccctgcagagcgtagactctcatcagagcagtccgatgatgcagtggctacgctcggccacgttactgatcgcgttgcgggcgttgcgccacaactcaccgatcgaggcttcaaccacatcagccttgcggccgccggtggcggtggtgtcgaaactgcggtattgctccgagagcgtcgccatggtcattgcgctgaccgcgttgcggtattcgctcacccgcacgctttcgccgtcgagctgttcgcccggcacatcctcaagccgctgatagccgtcggccatctggtcgcggcggaaaatgaacaattcggcgttcacctccgcgatcgcgcttttaattgccagccgcaggcgcggggcggtgattgtgccttcaatgcgcatcacgtcgcgcacgtccgccgggtcaatgtccggccagaaaaagacgtttttaacgatcggctcatcctccgggcgcggtgctggcgcgtccgggcgtggccgttggatcacaacggtgctcatatgacctcagaaagttagggggcggtggacgacggcgttaacgaggtgaaacctgtcgcggccgtcgtgccgcccggcgcggggcgcgttctgtcagcggctggcgacggtgcgtatcgcccgctccagccgttcaatgtcctttttcacgccgcagccgttatgcaactgcagcgcacgcttaaggtggttcaatgccagttcagccctgcccgccgcgcgcaagacgtacccggtgattttgtgcaacttggcgcgcacttggtcgggcatgtcttctgcgtcggtgagttccatcgtctgcgtgaggtggtcaatgttgaccggctccccggcctcaaaggcgcgggtggcagactcggcgacgtcttctgcgatgaggtatggcgtggagcgcgcgaaattgcccggcggcgccaactggtagcgcagcgcatagcgggcgatgtccagcgcaccgggaatgtccccggcatccagacgccagatcatgaccgtcatcagaatggcgtcctgcgcgccgcgaccttcggccagcacaccggcaacccagggggcatagtccggcagcagttggcgcttgagttcggccttacgctcttgtgagcgcacctgtttgagctttcgcttatcttcattgagtttaagcatcatccgttcatagccgttggcgtggcgcagcgggtcattctcccgctgcgcggcctcgaccgctgactggcgcataaggtgacggcgggcagggctggtcatggttatttaccgcctttcgctttgtcgtctgccggtgcttcctccggctctttcacttcggcgactggctccgctggggcggtggcaaccttcaccgcttcaacaatggcaccggccagcgccttaatgtcatcgccggaggtcggcagtgcggccttggtttttggctcggtcggcttgacggtcaacagctcgatgttctccaccagacagccgcaggcgtaatcctccactacatagtcctcgttgatggactcatagttttcgatgcggtcacgcttcgagttttccaccatatggcggcggtgtgtgtcttcctgccagtagatcgacaggttatccatgcgcgtaatcagcagcgcatccgccgggaagtacggcacgcgcacagcgggcaggttgccgatgcgcttctggctgataatcagatcggcggccatcgcttcagtgttgggctgttcctgattgacgagcgggaaatacttgtccgccagcagctggcgcccgcagatcaccaccagttcagggtcttcctgataccacggcgcaatcagggtgttggtggcatccatcaccagtgcgtcgaggttgccgtaatcgccaccgacacccacgcgaactttttcagactccacattgccatcgatacccacgattttatccagcacacggcccggcgcgttctcgcggtacttctgcaaccagcccggcgcaatgtcctgcagcagcgggaatttaacgcggttggaggttttggcgcggtgcgtaccgttaaagccgatcatgatgcggtcgagcgcctgacgtttcacaatcgcatcgcgtaaacgggtctggaagtcctgataacgcgcccacaggtcgagagtgttgtaacggatatggaaatcgtagttcacctgttggcagaaatagccttctgcatccagcgtggcaaagtcggccgtttcgcgctcatcgccgccggcggtgtcggtggtgctggcaatcgtgccgctgacatccagcccgattttttcgcctttcatttccggcaccggcacgatgttgatgcgggtcaggaacgtggaggaatcctgtacgcgggtcataatggtctgcgtaacggacggctcgacgctgaattttttatccagatcgccggtagcgacgccgttcagttcggcgaggcgggacagaaacgcattaaatttaaaacgagtttgcttgcgcatttttcttcctgtttttgttcggttttatcgggtgtgactgtcttagcagtcggtcagcacgtcttgcgcactgttgccgccggtggcgtccgggcgggcccgctggctgaaatcttccgaggcggaaagctgggcttgcagcgcgctgaacgcatcactgccggtttttacctgttgcttgaggtcggcaacctgctcgctcagtgcagcgaatgtctcggtaaagcgggcgtccgcttcctgcaactgctcggccacagtcatcaccgcgccttccatctcgccaaagcgcacatcatcggtggcctgcttgcgactaaacatcgatttgatgcgggcagagaatgaggtttccgggtcagcgaccggctcaaaatcgaaacagacttccagcggcgcggagaattcgacgctctcgtggcggcggctgaactccagcatgtcagtgccgaggctcgccgggtcatcggtgacggccaacccgaccagatacgacttgccggtcttggcgaaatcgcggcggatctccatcgaggtgaaaaccttttggcccgcgccgaccatcgacaccagatcggctgtcggggccagactggcgtacaacgcccacttgccgtgcaacagcggttcgtccggctcgtcgattttctcggccttcagctcaaccacgccgccgtaacgacggaaatagccatccggcaaaatccccttgatgtgctccatgttgatgcgggcgccgtacaccttcgggctgtaggtcgcggccatctgctgaatatccgcagcgccgatctcgcggccgtcaacggtgtcgccttcaacgccgatgcggaaaaacttagtaactttctttgccatgtaaacggctccggttgtggtgattgggttcggggctagtttcgggggaatggcgccgcgtctcaacgcgttgcggttggaagatctgaggcacaacaagggcttaatgcgagtcgcccggcgctttcgtagccttggctgcatgaatacgacaccggcaacaaccattatcagcgatccgcgccgccaagctgccttgctctactggcagggcttctctgtgcgccaaattgcggaaacgctgaacctcaaggggccgaccgtgcagagctggaaactgcgcgataaatgggacgatatcgcgcccatttcccgcgtggagcaaagcatggaagcgcggttgattcagctcatcatgaaagacgtcaaggaggggaaagacttcaaagaaatcgacctgttaggccgccagattgaacggctggcgcgggtcaatcgctattcagcgaccggcaacgaagcggacttaaacccgaacgtcgccaaccgcaacaaaggcgagcgcaagcccgccgagcgcaacgtgttcagcgaggccgccgtagagaagctgcaaagcatcttcacggaaaccaccttcgaatatcaaatggggtggtatcgcgccgggctgcaacaccgtatccgcaacatcctgaaatcgcgccagatcggcgccacgttcttctttgcccgcgaggcgttgctcgatgcgctgaccaccggccgcaatcagattttcttgtcggccagtaaggcgcaggcgcatgtattccgcaattacatcattgattttgcccggctggtcgaggttgacctgaaaggcgatccgatggtgctgccgaacggcgcccgcctgatgttcctcggcaccaacgtgcgcaccgcgcagagctacaccggcaatctgtatctggatgagtatttctggataccgaagtttcaggagctgcgcaaagtcgccagcgggatgtcgctgcacaagcggtggcgcactacctacttttccacgccgtcgagtctggcgcactccgcttatccgttctggtcgggggaactgttcaacaaaggccgccgcagtaaagccgatcacgttcagctcgacctcagccacagccacctgtcaaaaggcgtgctgtgcggtgatgggcaatggcgccagattgtcacggttgaggatgcgctgaccggcggctgtaacctgtttgacctcgatcagctgtcgctcgaatacagcccggcagagtatcagaacctgctgatgtgtgaatttgttgacgataccgcgtcggtattcccgttcgccgagctacaaggctgcatggtcgatacgctggaagagtgggaggacttcaacccatacgccgtgcggccgttcggttatcgcccggtgtggatcggttacgacccatcggaagccaacggcggcgatagcgccgggtgcgcggtgatcgcgccgccaatggtggccgggggcaagttccgcgtgctcgagcgccaccagtggcagggcatgaactttgccgcgcaggcccagaagattaaagaccttaccgaaaaatattgcgtggagtacatcggcatcgacgcgaccaccgtcggccaaggtgttttccaactggtgcgcgagttcttcccggccgcgcgagaaatcaaatacacgccggaaatcaaaaccgccatggtgctgaaagcaaaagacaccatcgcgcgcggctgtctggaatacgacaccagccacaccgacatcaccgccgcctttatggcgatccgcaaaaccatgaccgccagcggcgcgcgctcaacctacaccaccagccgcagcgaagaagccagccacgccgatgttgcatggtcaatcatgcacgccctcttaaacgaaccgctcaccgcaggcagcggccacagcagcccgaatattttggagttttactgatgagcaaacgcaaaggccgcaaggcatttaccacaccggcgccagccccaacagcagagcagaagcaggattttgaggcttttacctttggcgagccgtccgctgtgctggataagcgggaaattctggattacatcgaatgcacaaccaatgggaagtggtacgagccgccaatctcattcgatgggctggcgcgcagcgtgcgcgccgccgtgcatcacagctcgccgatgtacgttaagcgcaacattttggcatcaacgtttattccgcaccggctgttaagtcagcaggagtttagccgctatgcactggattatctggtgttcggcaacgcctatttagaagaacgtcaaaaccggctcggcgcgccgctgcagctgaaatcctccccggccaagtacacacgccgcggcgtggatcgcggcgcttactggttcgtgcaggactggaaagaggcgcaccgcttcaagaccgacagcgtttttcacctgattgagccggacatcaatcaggaactttacggcctgccggagtacctcagcgcgcttaactccgcctggctgaacgaggcggcgacgctgttccgccgtaagtattaccagaacggggcgcacgccggttacatcctgtatatgaccgacgccgcgcaaagtacaagcgacgttgacagaatgcgccaagccatgcgtgatacaaagggcttaggaaacttccgcaatctgttcatgtacgccccgaacggcaagccggacggcattaagattttgccgctatccgaggtcgccaccaaggatgactttttcaacatcaagaatgccagccgcgacgatttgctaagtgcgcaccgcgtaccgccgcagatgatggggattatcccgaacaataccggcggcttcggggacgtgaaaaaagccgctcaggtgtttgtacgcaacgagctaacaccgctgcaagagcgcatgaaggaggtgaacgactggatcggggaagaggtgattagattcgcgccgtatgagttgccgaccgaataagcagaaagccgccagtgattggcggcttttttgttggcgctggatcaggaatgcttttcgataaccagatcaacaccttcattcagcagttcattaatcgactgcccggtggccagtgcggcaatggctaacgcctgatggcgttccggcgacaggcgggtggttactttgccgctgtacgacttgtaaggctcgatgccgtctttatggcattcatcgagaaagaccgcgagtgagatcgcgccttctttcttcagctcgtccacgctgtaggcgtagaagtcggcgccgccattcagcccgacaaactctccccggaacatttcaatttcagggtcgaagttgatgacggccgtatggccgtcaattttcagtgtgttattcatcatggttttattcctaagctatccaaccagatccgaatggagttaaccgcccccttgtcagtggtaggtctggggtgtggccggtgaaagactcttttttcacctttcaacagcaccgcgatcctagaaccttccctttcgtgaatctccgcccctaatgcggtaaaaagcgcctcaatatcagaccactttatagaaccgttgacaggccgggcaaacacatctgacagcgttttttggtgtcgtttgttcatggggtttatagtatcactttatgacaccattgcaagggtattatggtgtcattttttggtgtcactgaatggcgatgttatgcagtgcgctgtaagcgcctgagagcgccatcatggcgccacaacatcaaaccccattctcatacaagtattgcgataaatcgccgtgacgggacgctggcggctcttttgggaggggttcaacacggcttgcgcgcaatgctatccccgcctcgcctgcgcgctttatatgtcgcttttaatgcagttgcatgatccgtcgcgatccgcgccagtgctggtattgcagggataaaaatcgtaccggatcatcatgcgatttcatgcagccaacgcaaatttaaaaagataagccccttccacaatgagatctacacatgcaatgacgaagcctttcatttcactattaataaggaaattaaaaatctagataatcattttaaaaactagcaccatcatcttttcttgcctttattaatattgatttgttcctttaactccattaacgtttctatcaactcatgcaccttggtgctaggattgtcagtaccactactttcggccgctcgtaaactttgtttagccttagtgataacctcattcaaatcctttgttttcaatgagttaaatgttttgtagaaaatacctttagctgctttatcatatcctttaatatattttttcaactcagagacgacttgatccccagcacttttcccaggcaaccctctatattcctttgttgaataagtataatgaaggagtaaccaaaactcgaaacaaggaacggaattcactgtaaaccataccttattaggtttagctcttttaatagcatccaatgctcttaaataatcaacatgagcatctttatcaattacaatataaattttgtcatagggcgcaccttgggcagccatatcttcttgttttttctttgcatgtttcacaacacacatagggctggatccagattccccagtaacatcaattacacttgcagttaataatccaaaatgagaaatcaaatcctcgaaataagtcggctcagttttctcaccttcacaagcaataagaatcttcattaatggtgcttttgtggcctctttcctcgctaaatctttagatgtttttgggccacgtctttttttaaataaatcctcactccccatcttcgcccccaatccattttctaatattaggaagggcaccgtatcgaccatctaaatatgccgcctccaagttctctctcccttttctagggctataatcagtcaatgggtaaatgttagtttcgcttttatcatttttctcacaaaaccaaacttgatctcttctgaaaacactctgatttagaatagatgtttcatgagttgagaaaattagttgagccccttttttatttgtcattggatcattaaatagcttaactaggaaaccaactagcttaggatggagtgtatcatgcagttcatcaatcagaagaacatacccattatccagagcatccaaccaagggccagctaatgagaaaaacttctgtgtgccgtgtgactcctcctctaatgagaaagttacggactctcctttatcatcatagtgaacagtatagatatcaagaacctccttatctttcatatttgaaatgacaattttcttgatatcttctggcatttcttctggcaaggtttccggattaaacttctcttttttcactaagatgtcatcaatccctacatctgcagctttcaaaaaaccaagaatatctttcttagtattttcagtgcaccgcttagctgagaatgaattattccaaccagatacacctgacattctaagtgttttttggaaccacataaacactggtttcagttgttcactgtttaattgaaccgctgtcgacaagaacaaagcattcgcccttgtagaacgctgccagacttgtttttcgcccagtaaataattaccgaaatcccaatcatattctaatgattcagcattccaagaacgataataccatttttgaggtcggcctttagggtatgcatagagccattcatcaatgatacgatcctgcgtagcagaaaatccgaattgatatcgaaccccttctgcaataaaaataacttcgaattctgttggttgcccgactgactcagaactcaacttaaatggatatacagcaatattctcaccagcttgattgttggcagctgattgagtgacaagatccatcattgctcgtacagcaagcagtaggttagattttcccgccgcattcgcgccataaataactgctgattttaaaacgtttaagtttacactcccttcaaccttaaagacattactatctaactcattgcttttattagcaataagagaaagtgtttgtctgtttttgattgagagatagttctcaacattgaattcaattaacattttttgctcctttagctcggtgctgtgaactctgtaagagcagctcacacaaccgccaaaaccaactttaaatggactttatgacaaaaaaagccaaaaatacagcaataatttattatcaagtccttttttgaaaaaaatcatcatttacttaagtttttttgttgttgcatcacttgcacacgctgcaataatttgagtaaccaattgattttattataataataaaaggccatcttctgaaccacctacgctagtgtcctggcctgatatccgagagtgttaccataagcgatagttgaacgaaattggcaaccagagatgcaaaatttctcagcatcattgcagttcagtaccactagtgcgacgaatgttcgaagtaacttagcttttatctaaagggctatctaagagatcgtagaaagctgcctgatcacttctgctttttcaggggcaatgctggttttcatctcccccgccagttctgaaatccatatcagtgcaatgtctttgtctttcgcttggctctcataacaaatccccagacgggcgatgagttcaattctttctaaaacaaccacttcatccactgcttgcaccctttccctccgatgcttaattactgtatacatatacagtatatgcctatcggatttaattgcgcaagaaattattggaagcccgcccaatcgctaaccgccggatagtgcattgaaatatcaccaaatttgactttagcgccgcgcgccaatgcctcaagttcccagcgcgtcggctcaatgccgtgtagtgccagctctgagtaaattttggatacgcgatcgcgctcggcagtggtcaatctggccgatgcagcaggctctatacgcttatatgggtctattcctctttgctgcctgtttatctgcggggcatttgcccgtaaacgcgtcataacagaccgtgcaacggtcatgtcatcccagtcaatcagggtttccggtgcatgttccatcaccgccacggcctctacaggccccccatcctgcgcattttcggcgccaccgctgccgaccaacccacagttattgacaggactccgaggcgcgccggaggcgcttttcaaagtcaaaggctcaacggcaacggctttagcgacaatgcgccattgcgtggtgcgggtttcataaacacgatcggcgccgatgtgcggggcaaaaatccccgcgattttctgcacttcttcgtcataggcgttgcgctcgtcggcaacccggcgggctacacgcacagtctgatcgtcacgggcaacgttagggccgccctgggccagaatgtaagcggcaaagtcaccggcatcagcagcagcgcgcaccgcctcaacggtttcgtcaaactcatcggccagactgacagagcggatcttgcggcactcacgccatgcgccgcgcgacggcaggccgataaagtggaattgagggatacgccacgttgaagcccacgcggtgacggcggccgccgtatcagtcaacagctcgccggtttcatgatcgcgctcgccgtccagcgcgtagccgtcgatattttttgcaatgtatttggcgatatagcccgccgcaccgcctttgttcaggtgcttgcagtcaaaccggtttttagcggcgccgcgctcatccccatcttcagccatggcataacggcgcatgatgtcgatcacctgctggcgctgctctttggaggtaaacagcatcatatgccagtgcggcgtcgcatcatggtgcggttcgacaacgcgcacgccgtagacctgcaggcccgcatctttaaacgctgtgcggatcttgctaaacagcttcacaagatagcgctggccgtcttttggcgtgtacgcctcttcatcccatttgtgattaaaatgcaccttcgggctgttcttgccgacggcgcgcgtcgggtgatatttggatggggtggtgatggtgataaacatccctttatcgccacggatagcggcggcctgctcaacaccggcgatcatcgccattaactccatacgacggatttctgggttagagatgcttgccatcaccttgtctatgaggctgaagcgttcgccggtctcgacgttctcaagctcgcggctgttcagataatcaaaattggactggcggcgcgctttcacatcccgaatagcctgcttactggcatacgacgacgccccgcgattcacattacccagggcgatcagcaacgcctcgcgccagcgcgtgcgctgggacttaaactggcgttcccaccactcggaatcaaccaaccgtgacaggctggcaatcgctgaccgggcatcaagtttgcccttgcggtatttgcgccagtgcatcggtatgatgttgaaggcgcgcgccatacctgcaatgcggccataaaattctgattgggtggcatcttcgaacagcccggcattgtcgccgccgttctccgccacaaattcatcgcagtaatcttcgtaattctgcagaagttgaccggccacccgatcggcgaggcggcgtaactctttgtcatccatgccgggcagtgaggcgtaattatcaacttcagcagaaaaccgcattgacgcggcgagattcatcgcatttttggcgctcaccgtttgcaggcgcggccagatgcggcgatcgaactggaataccagccatttgttagcgtcgtgcagccctttgctcttgagcaaattggtgtaacgcgtcaggaacatggcgctgaggaagcgcggcaggcggcggatattggttaaaacagcttgcccctgagcgagttcctcacgggtaagcggtcttaccggcccggcaactgccgggcgcggttcgttccatgggtaagcgtaggcgggtgccgcttggctcattgcactttcgcgccgttggcgtaggcgcagttgccacagtaacgctcattgcaagcagaacacagctcaacatcgaagccaacggtgcgaatagcgtttttcacgtcttctttatccagccatgttccgtctgggtctggtgacatccacggatcaggagaatacggcagcggcaaccgcaccggcgtagccagccgcttttccagctcggcgatgcgctgagttagggcggagacgtactcttgcgagtagacgggttcttcattaaacgcggcacaaggtttgatatagccgcaatcgccgtaagaaagctctttcctgtcccgctctcccacataccctaccggcttgctcagttcgctcagcttattgtccatttgcagcctcacacaccgcaaaagcctcttggcacaggttgccaatgcggcctatttcggcacccaatgatgcaatgctattaacactggaattacggacgctgtgatgaataaggccgttcacaagctggttaatcgtagggtaatagccgatagcctcgtaacgctcttgaccttcgctttttcctgttttccctaccttcaccgtattaagaatgaattgcaggttatcgctggtgataacaaactcagaaccgattttaatttccatgttatttccttaatcgtaattttgattttctggtctgcgtgcaaattctgaatcgctcaaatcagccgcaataaaatgacctgccagcaacgccagcaggccgagcaaaatagagaactccgtcatgccttccccgcgtaaaggtgactttgcgtctcgcggatctgctgacagcttacgcaggtatcaacgccgggaacggcagcgcgacgcgcggcaggaatcggagcatcacattcttcgcaaacgaaagcagaaggcagcgcagaggatttacgggcattgataatctgcgcctccaataccagcgcttgccgctcctgttcgtagtccatcaagtcggccattagtgcagctcctgcgcttgatgctcgatggcttcagcctcttggcgcaacagctccacagcctcgaccgctgttaacccatcttgggtgatgtgggccgccagccgaaccaaacgcgcagcagctacctgagattggtttttacgttcatcaacacgcgcgctatctaacaaatcttgaaactcatttgttaaggcagaaaccgcgcggcaggtaccagcgacaacaccacgctgaaaggcattatttgccgagctggttaaagttggagtaagaagcaaagattctttcatcgtaaattccttatttcagacaaagcgatgcccggcgggttaacgccagaattacgcaatgcggttaattaacgtttaattcgcaatcatcatcactgataaatcgcggtaaggtttttgataaatcaatcaggtcattcagcgcccacacgatttgtttacgctctgaataactcatttctgcaaacttcatttttatatgccgctctttcagcccggcatgaaaacaaacagttctgcggatatgttccggcgacttatcaaaagcctcttgcgcctgattccgcttatgcgggaacagctcacgcttaatctgtgaaatgcgcttaataccgatcgctttttgtgtttcagtagccaacaacatgacagccccaattaacggcagaataaacggcgcagcggtgaaactggcttagccgttgacaggccacgcagcaaggcagcctgatcgtgacttgggcgccagcgcttgccgcccggcagttcaataaaaccgtgttcaaaatgccgtgatgggctttgttgtttcagcagcggagcgatagaaataaccacggtgatcacctcagcttaaaccagcaacagcgctcagcccgctgatcacgtcaacggtggaggccagagccggggtggattggatgcggttctgaacggtcaagccgatcagcgacaaatggcggatcgcggtgttgacgctttcaagcagtgcgcttttacgtaccggcgttttgtggtcgccctgaacggcggcggcggcaacgttgccaactgcggccgtagcctgcagtgcatacgttggaatattcccggcgcaagcctcattaacaggcacagacggcatgcagttgatttgtgccagtaaggcatcaatcaggctggaatcctctgtagcgtcagtgatcgccagcagttcggcacacgtgagctgatgcggctggcccggactcaatttgttgcgcagcgtctgggcgttcatgccgagctgtttcgccagcgccgtcacattgtggcgtgctggaaactgtcggcaggcttcatcgaagtgcggatgtttagaaacagcgtaatcaaacatagttcactcaaagttaatctgacaggataactacacgtttagtgaaatgttgcattcagacagcgcttgaaccgtcaatgcaaccatgttgatctcaactgctccagatttggtctgcttaggtttaatgggtaagcgcccatcttcaaccatatggcgtgctgtaccgatcggcgtgccagtaatacggcaatattcagctaaaggcaggtaaggggtaggaatcgcaattgtaatgttagggcgcatgaggcaagatccgaagttaatcaatagtgctcaatagtcatcaatgttgcttcaatcaacattggcaatgctacgacagcttaaagcgacattgcaaggataaattaacgtgaagttacatatagaatttgatcaaggcggcaaagcagtcatagagcggattgttgaagcatacggattcagcacccgtgtagctttggctgaacatctcggcataagtagtagcagcatgtctatgcgctacaaacgagacttcttcccggccgacatagcgatccgctgcatggccgaaacaggtgttaagctcgagtggttagcgaccggtaaaggcaaaatgtatgacgatggacgattagatgtgttggagttgcccagcaaaaagttggtagacggtgaggtcttcgaagcttctaatttagtgcttgataaaaatttcttcccagccagccagcaacctcctatcaagccagtaatggtctataacgcctcaaaccaatatgtcattgagaccgaatttaaagagatttatgacggtaaatggctagtgaacattgaaggaaaaacgagtattcgcgatctgacacgcatccccgttaataaagtgcgtgttaccggtgctggcgtgcctttcgattgtggtattgatgagatcggcgttttaggcagagtaataagtaaaatagagtattactaaacacatgggcatcaagaagctaaatgacggccaatggcagcttgacctttacccgctagggcgtgctgcgggtaaacgtataagaaagaaatttgcaacaaagggtgaggcgatggcttttgagcgctacgctttagatcctgcgacaagcaagccatggctgggagaggcaactgataagcggacgctgaaagagctgattgatacctggtattcattacatggaatcagtctagatgatggcgaaaaaaggcaaaccactatgcatcatgcctttgagtgcatggggcggccattagctacggagtttaatgctctgttgttcactaaatacagaaaagccagacttgaaggtaaatttcctagaactagtcgcgtgcagaaagtttctcatcgcacaatgaatttggagtttgcctattttcgagcgatgttcaacgaattaaaacgcctcggacattggaaaggtgaaaaccctatcgagaatgtcacagagtttaaaattgatgagtcagaaatggcattcctttctgaagatgagattaaacgcttaatggcagagtgcaaaaatagctcatccgccgatttatctattgtggttgagattgctctttgcactggcgcccgctggtctgaagcggaggaactacgcggaacacaattgaccaaacataggatcacgtttactaaaacaaaatcagggaagaacagaacagttccgatcagcgaatcactatatgaaagaatccctaagaagaatggagcactgttcaactcttgctattcagcattccgttcagctatcgcgcgaacaggcgtagagcttcctgatgggcaactgacacacgttttacggcatacattcgcctcacattttatgatgaatgggggaaatatattagtgttgcaaaaaatactcggtcacagcgatataaagacaacaatgcgttacgcacacttttccccagaccaccttagtgatgctgttaaactaaaccctatatcgagaatgaaaagatgaaaaaaagatcaaaaattattataggaattttattgtcaattattgccatactcccaattttatcttatggtttgaagtttgggtttaacataaaaaacatatctggacaaaatgcaaattgggccgcttttggttcatttataggaggcatctatagttctattttctcttttgcaagtgttttcattctttctataaccttatatcaaactagagaaaacaataaagagcagatccgattaataaagcaagaaagcactattaaagactttaacttactagttgagcaattactaaatcatttttcatcacaaaaaaaatacacaccaagaataagagacgaagaaaactttcttcacagacttgatgaagatctaagaactaatcttaagctttccccaacattaagctttgaagatcttgtagagcaacatattagactgcacacctatgacttatacaatgaggaagctaacataatgataaacctagcttacatatttgatatgattccagatgatttgcgcagtgtatataaaacagtttttaactcaaaaattagtaacgacaggcgattcttgttaaaaacctatatgaaaattttcaaatttaatataactaacaccttcatagataagagtgacttctgcgaaatccctcaaaacctgatagagctgaaaaatcagtgtgaccgccctttctagaatgcctcaaaactgcctcagtagaccgggaaccctgagtaaacttgattagcattgagcacacaacgtattgttttttatggcaacctattgttttatataactctatcaagggtctcataatcgcttggtcgttggttcaaacccaacaggggccaccaaattatcaaggggttacgttaacagcgtagccccttagttttttctgcggcgcaaccaggcattcgcctcttttgcaacagaacgcaaatttcattcgcccccctgccgcctctagcgtgaattaacatcctcaccggcctcgctattttgcgcgtcgaatgcggttctcgccgcatcaatatcggcaatatgctcattcgcccaggttcccagcgcgatgacgggtacggtcaatgagcaaccgagcggcgtcaattcatattcgacgtgcggcggcatgacggcaataactgtccgcttgactaacccatctcgttccatattgcgcaggcacagcgtcagcatccgctgagatattccattgattgtacgctttatttcagtgaatcggcgtggcccgttcgccaagagcataatgatcaggacactccacttctcaccaacgcgcgccaatacctggctgatcttttggcagtcggcatgtcttaaatctcgaggttgattagtcacattcatgataccgggttctcctaatgtgccttattgtctgccattttaggacatggttatattgttatccctggttaccattttatacctaaggatttcatcatgacactgcttcatatcgattccagcattctcaacgaacaatcggttagccgccagctcacggcggcgatcgccaaacagctgtctgcagctaagccagacgccaggatcatccacaccgatctcgccgccgacccgattaaccacctttccagcgccgaatttctggctctgcagggcgtggaaccgcaagacgagcacgtcaaacaggccgttgcccgcaacgccaaactcgtcgacgacttccttgccgccgatgtcattatcgtcggtgcgcctatgtataactttacgttgccgactcagctgcgcgcctggcttgaccgacttgcagtgccaggcagaactttccgctatacggaaaacggcgctgagggcctcgccaaggggaaacgcgttatcgttgcttccacccgcggtggcctgtacggcgaaggcacgccactggccttcctggaccatcaggaaacctatctgcgcagtttcttcggcttccttggtattacggacatcaccttcattcgagcagagggactggcactcagcccggaaaaccgcactgtcgccatcgatgcagctgcggctcagattgacggcctgaccgcttaatcggggccggttcagaacagcaagagcaggctcgcggccagtcccttttttgggctggccaccggcgatgcaataccgctcaattctatggctgtgccgcgtaccccggaattcgttcgcgccggatttgtaaactggagattcaatcatgaacaccacgttgacctcaccactcgcgcccaacccgcggcgtattacacaacgcacccgaggccacggccacggcccgatcacccggctgatgagcccttccgacctgggccaggtgattaaacctttcgtattcctcgatctgttcgaggcggatcagcgcaccatggcaatgctggccaacatgccgctgcatccgcattcaggcatagccaccgtgaccgtgccgctcgaaggcgcttttcactacgaagatcccgccagcggcgctgtcgggacgctcggctatggcgcagtggagtgggcgcgtgccggcggtgggatgtggcacggcaaggaattgtccgccacggatacgccgcgcatccagggattccagctctggctggccctgcccgccgagctggagaacggtgaacaggaaagccgttatatcgaagcccggaacatgcgccaaatcgggccggcgcatgtcatcattggcaaccatgaaggcgtgcaaagcccggtgcccgcgcaggaaggcatcaattacttgctcgtcacactcaaacccggcgaaagctggacttacctcccgccagccaagcattcggtcggctggctcgcgctggccaaaggccggctcagcgcagacgcgcctatcaacgcgggcgagatggtggtattcgaaccgggggaaatgtccattgtgcttgaagcatccggcaatgaagatgccgtattcgttctcggctcagccgtgcctcacccgtatccgctgcacctcggcgcctattcggtacatacctcagcatccgcgctggaagccggcgaacgtcgcatcgccgaactggggcgcagacttaaagaggccggcgagcggcgtacggcctcgggtacgatccccgtctttcgatgacgttgatgatgggatcacaatctgcgacgaacgatccagggcaggctactcacatgcgccgacgcatccggccgttcgctggcggtgcaacgtgatattatcgccccactcccttcagttgccggataaggatcccgcatgatcgtcaactgcgaccacgacaacctcgacgcctggctggcgctacgcgcggcgctgtggcccacttgtccgttggaagagcaccgcgcggagatgcgcgaaatattggcttcgccgcaccacaccgcgtttatggcgcgggggctggacggcgctttcgttggctttgccgaggtcgcgctgcgccacgattacgtcaacggctgcgaatcgtcgccggtggcgtttttggaagggatttacaccgtcgaacgcgcccgccgccagggctgggcggcgcgtttgatcgcgcaggtgcaggagtgggcgaagcaacaggggtgcagcgagctggcgtcggataccgacatcgccaatctgtactcccagcgcctgcatgcggcgctgggctttgccgaaacggaacgggtggtgttttaccgcaaaacgctgggctgatcaggcaatcttgctttgccgctgatgcgccagctgctcggcgcgcagcaggatctcctgcagatcgtcctcatcgatatcgaacagatccccctccatcaacgcctcgtgcagatcggcgcgggtgatggaaacggcatcgatcggcagattggccggcttggcctccgccggcgccagcgcgtgcgggtagcgccgcccggccaggttattgaacagaatggccagcgccgccagcagcaccgagttcagcagcaccgggtacaacacgaagtggtagcccatctgatgaatgccggggccgccgaggatggcggtcagcgccaccgcgccgccgggtgggtgcaggcagcgcagcttgaacatcaggccgatggccaccgccgccgcaacgccgcaggccagacccggatcggggatcagcagaccggcgctcacgcccaccgtcgccgccagcgcattgccgccgacgatcgaccaaggctgcgccagcgggctgttcggcacgccgaacagcagcaccgccgaagcgcccatcggcgcgataaaccacaggttcacctcgcccaaaataaagtggctgatccagccggcgagcatcagccccaaaccggcgccaacgctggaaatcagcatctctcgtttgcccaccgccagcgggtgcggccacaggcgcgcgcatcccactttcactcgttctatccactgcgtcttcatgttacccaatacggctcaattcacgtgttggcaacaaatatatcacatcatcctgaaggagctcacggcgccgtaaaccgcgccgcccaagaacttttaggctaacagattgatttttagcctcccctcgacaatgatgaatgttccccccttaaccccgaggaaccgccgatgtctcaaccgatcaccgagctttataccgacagtgaatttttcagcccgtacgccatgtccgcctttgtcgtgctgacggaaaaaggcattccgttcaccgtgaagccggtggatctggcgaaagaagagaacaaagaggcagcctacgcggcgctatcgctcacccgccgggtgccgacgttggcgatcggcgagttccagctctcggagtcttcggcgatcgccgaatacctggaagacatccacccggcccacgccgtgtacccgcgcgacgtgaagctgcgcgccaaggcgcgcgagatccaggcctggttgcgcagcgatctgctgccgatccgcgccgagcgctcgaccgaagtggtgttcaacaacggcaagttcccgccgctgtccgaagccgcgcaggaagccgcgcgcaagctgatcgccgccgtggaaaagctgttgagccacgggcaggataatttgttcagggagtggtgcatcgccgacaccgatctggcgctgatgctcaaccggctggtaatgcacggcgatccggtgccggagcgcgtgcgccactatgcgcacaagcagtggcagcgcccgtcggtgcaggcctggctggcgttgtcggaaaaacggcgcgcctgaggaaaaaaatcggcggccacgacgccgccgttctcaatgccgagaaacaacatcactgcttgagggaaggcaaatcaccatccagagggcagatagcctaacaatgaagcgatggcgtacaccgcgctggccaggtacagcaacacaatgctgatctgcagcagcggatgcgtgatccagttgcactgccagcgtggggtttggtcgccgtgtttgcgcgcgccgcgcaggatcagcatcggcatgatcgacaggatcaccccgctgaacaccccggcgaagtagagcgcgttgacgaacgacaccagcccgctgtaggccagcgcgaacggcggcaccaccaccagcagcagcacgccgaagcggcgcagcggcaactcgtcgttgcccagccggaacttgtcgaagatattggtcaggaagctgccgcccaacccccagtacgaggtcagcatcgcgcacagcgcgaagatgttggcggagaagaacgcccactgccccagcgcctggccccaggaaatggtggccacatcggagatgtcatccagcccgctgagcgcgatcaccgacatcggcaccgccgccagcaaaatgaacgtcaccaccatgccgacgatgatcgccttcggcagctgctccggcttatcggcaaagccgcgcgccatctccggcacgatgtactgcgccgagaagcagaacaccaccacgttgaacaccggcaccatatagcgccagtcgccgtccagcaggttgcgcatatgagtggtgtctttcagcagcgtcgccgccaccagcgcggtcaacatcaccaccatgccgatgctgatgaacttctcgccgcggccgatcgctttcaaaccgagatagagcacgccggcggcgggtacgaagaacagcaggctgcccagcgccggcgagatgccgaacagcgattgcagcagcttgccgctgccggtcatgtaggcggtaagcgccccgacgctgttgacgcacaccgaagcgaacatcaaccaggcgcccaggccgccgacgtagcgcttcgccagcccgctcagctgcagatgcgcgcgggtgcgcagcgtggattcggcaacgtacagcatggtgatggtggtcaggctccccaccagcaccagccagaacagcagcggcaggaaacccgccttgctggaggcataggcgatggagagcacgccggcgccgatgttggtgccgacgatcatcgccaccccttcgaggaaacttaacgatttggcgggtgcaggtgctcgcaccccggcggcaagcgccggagaaacagagatattatcagacatgcatcatcctttatcgcccggcgacgctggccgccgggatgggttaacgtcctgacgctcaacggctcacatcgatacacaggtatttcagctccagatattcttctatcccgtagcgcgatccttcacgcccgagccctgactgtttcacgccgccgaacggcgccacttcgttggaaatcagcccggtgttgatgccgaccatgccgtactccagcgcttccggcactcgccactggcgcgcagcgttctgcgtgaacagataggcggccagaccgaattcggtgtcgttggccatggcgatggcttccgcctcgtcatggaaacggaacagcggcgccaccggcccgaaggtctcttctttggcgaagcgcatcttctgcgtcacgccggtcaccaccgtcggctggaagaaggtgccgcccagcgcgtgcggctgaccgccggtggcgatctgcgcccctttgatcagcgcgtcgtcgatgtggctctgcaccttcgccaccgcatcgctgtcgatcagcggcccctgagtggtaccttcctggctgccgtcgccgactttcaactgctcgaccgccgccaccagcttctccgccagccgctcgtagatgccgtcctgcacgtagatgcggttggcgcacacgcaggtctggccgctgttgcggaacttggaggccatgatgcccgccaccgccgcgtccagattggcgtcgtcgaacacgatgaccggcgcattaccgcccagctccagcgacagtttcttgatgctcggcgcgcactgcgccatcaggatgcggccgacctcggtcgagccggtaaagctcagcttgcgcaccaccgggctgtcgcacaacaccttgcccacctgcgccgcttccccagtcaccacctgcaacacgccggcgggaatgccggcgtcctgcgccagcttggccaacgccagcgcggtcagcggcgtttgctcggccggtttgacgatgatggtgcaaccggccgccagcgccggcgccaccttgcgggtgatcatcgccgccgggaagttccacggggtgatggccgcgcacacgccgatcggctgcttcaccaccaccaggcgctgcgaagcctgcggcgcctgcaataccgcgccgtccacccgcttggcctcttcggcgaaccaggtgatgaacgacgcggcgtaggtcacttcgccgcgcgcttccgccagcgatttgccctgctcggcggtcatcagctgcgccagatcttcctgcgcggccagcaccttatcagcccaggccaacagcagcgcggaacgctgcttggcggtcagctgtttccagtcgttttgcgcccgctgcgccgccgcgatcgcctgttgggtttcctcttcgctgaccagcggaatgctggccagttcggcaccggtggccgggttgatcaccgcttcgcgcttgccgctcagggcgtcgcaccattcgccgttgatcagacactggctgcgcaacagctcgggattgttcaatttcatgccgttcgctccttagtgggccagcgcgcgggacaggatgcccatcgccttggtgaactgatcgtccgggatagtcagcgggtagaggaagcggatcacgttgccgttcacgccgcagctcagcagcagcagcccttcctccatcgccttctgctgcacctgacgggtgatctccgccgaaggcttgccggtagccggatcgttgaactccaccgccaccatcgacccctgcgcgcgcacatcggcgatcgccgggctggttttgcgcgcctgctggagcacttccaccaggtgctgacccaagcgctgagcgcgctggcacagttgctcctcttcaatcacgtccagcaccgcgtgcgcggcggccaccgccagcgggttaccggcgtaggtgccgcccagcccacccggcgccggcgcgtccatcacctcggcgcggcccgccaccgccgacagcggcatgccgcccgccaggcttttcgccatggtgatcaaatcgggcttaacgctgtagtgttccatggcgaacagcttgccggtgcgggcgaagccggtctgcacttcgtcggcgatcagcagaatgccgtgctggtcgcacagcgtgcgcagcgcctgcatgaaatcggccggcgccacgttgaagccgccctcgccctgcaccggctccagcacgatcgccgccacctgcttgggatcgatatccgctttaaacaggcggtccaggctgttcatcgcgtcttcggtggtcacgccgtacagcgcgttcgggtactggccgtggaacaccgagccggggaatgggccaaagcccagtttgtaaggcgccactttgccggtcagcgccatggtcatgtaggtgcggccgtggaaaccgccgccgaaggtgatcaaccccgggcggccggtgtaagcgcgggcgatcttcaccgcgttttccaccgcttccgcgccggtggtgaagaaggcggttttacacggaccggcgatcggcgcgcgctggttgatgcgctccgccagcgagacatagctttcgtaaggaacgatctgataggcggtgtgggtgaaggcctgcagctgcttttcaatcgcggcgatcaccttcgggtgacggtggccggtgttcagcacggcgatccccgaggcgaagtcgatcacttctttgccttccacatcccacagcgtggcgttctctgcgcgctcggcgtaaaaaccacacatcacgcccactccgcgcggggtggcgtcctgacggcgttggttcaattctgcgtttttcatgctgttctctccggtcggtgccagttacacgtttcgttcacattcgtgaaacaatgccgtttatttacacaggatgtggccctataatcgagtgccagttacgaataattgagggatccaattgcgctcattgagtggtgatctgttgctgcagcgcctcggcgaacagcccgatgacaagctgcacaagcggctttacaacgcgatccgcaccagcattctcgacggcagcctgccgccctccagccgcctgcccgcctcgcgcgacctggcgcaggagctcagcctttcacgcaacaccgtgttaaccgtttatgaacaactgttggcagaaggctacgtgtcggcgcgcgccggcagcggcaccttcgtcgccgacacggtgccggacagctgcctgtccaccggcggcgccccggcggacggcagcgggcaaccgcggcgcgtcgacctgtcggagcgcggcgccacgctgctgcaccacgccagcgccagccccaaacagtggggggcattcattcccggcgtgcccgacgtcaacgcctttcctcatcagctgttcagcaagatccaggcgcgcctcagccgccgcccggcgccgcagcggctgacctacagcaatcagggtggcagcccggaactacagcatgcgttggtggagtatttgcgggtggcgcgctcggtacgctgctcgccggaacagatcctgatcaccgagggcatccatcaggcgatcgatctggtgacgcgcatgttgtgcaatccgggggatgacgcctggatcgaagagccgggctattgggggatccgcaatatcctgcgcatcaatgcgctgaacatctgcccgctggcggtagacgaggccgggctggtgccgccggagcagccgaccaacccaccgcggctgatcttcgtcaccccgtcgcaccagtatccgctcggctcggtgatgagcctggcgcgccgccaacggctgctggcgctggcgcgcaacgccggcgcttggatcgtcgaggacgactacgacagcgaattccgtttttccggccagccgatcccggcgttgcaagggctggaagccgacgcgccggtgatctatatcggcaccttcagcaaaacgctctacccggcgctgcgcctcggctatgtggtgttgccgccgccgctggtgcaggcgctgaaaaccgcccatgccgagctgtaccgcggcgggcacctgctgatccaaagcgcgctggcggagtttattcaggcggggcactacacggcgcatatccgccgcatgcggttgctgtatgcccggcggcgcgccttcctgaccgggttgatcgaacaacatctcggcaagcaggcgctcagcgaattcaacagcaacgccggcttgcacctgatcctcaacctgccggacgaggccgacgacgtggcgatcgccgccgccgccggcgcgcgcggggtgctggtgcggccgctgtcgcgctactatatgcagcccaaccgccggcgcggcctgctgatgggctttgcctgcgtgccggaagagcaaatggccgccgccttcacccagctgctggcgtgcatcaacgccccgcactaggtcagatcgccgcccgcctgcctcaccaggcctgaagccgccagccgtccgcttgcctgttcaggcggtgcgtcggcctcagcgcctgcaggaagtcttcgtcgtgcgacaccaccagcatcgcgccggggaaatccgccagcgcggtttcgatcgccagcgacgacgccagatccaggtggttggtcggctcgtcgagcaacagcagctgcgccggttgtcgccgccacagcgcgcaggccagcgccgccttcaagcgttcaccgccgctcagcgagcccagcggcaacgcgatgcgatccgcgccaagctgcagctgcgccagccgggtgcgcagcgccccttccgccagcggcgaatcctgtagccccagatgttccatcaccgacaggcccggatcgagctgcgacagggtttgatcgaggtaggccgtcgacagcgggcaatgacaatggccggaaagcgccgccagctgcccgagaagagtcttcagtaaggtggattttccgcagccgttggggccggtcaacgccacgcgcatcgggccgtcgatccgcaaatccagcggcggcgcgctgacgaacggcagttgcagccgctcgagcaccagcacctgcttgttcgcgttcacttcactgcccggcagcgccagcaacaccggcggttcctcctccacccgctgataggcttcacgcaccgccgcatcgaggctgtcgcgccgatcctgatgctgtttgcgcagcgtgcctaggctctccttcgccgccgacttgtaggccacccgttcgaaagaggcgatattcagcgtatcgacgacgcgcagcgtttgcgccgagcgccgctggctcatgtcgtgctctttctgttggcgagcgcgggtgcggcggcgctcctcgcgcgcatgctccagatcggcgcgcgccgcctgctgctccgtatcgcgctggcgccggtagtcctcatagttgccgccgtagctgcgcagcgcgccgggcgtcagttcgacgatgcgctccatgcgccccagcagctgccggtcatggctggcgatcaacagcccgccccgccactgatccagctgctgatacagccaggcgcggccggcgctgtcgaggtggttggtcggttcgtccagcagcagaaaatccgcctcgccgagcaaggcgccgcacagcgacgcgcgcatccgctcgccgccgctcagcgaactggcggatcgcaacggatcgaaggccggcaacccggcggcggcaaaggcgttttgcagacgatcgtgaagatcccagcgcccttccagacgatcgatatcgtccgtcaacggccgcccctgctcgagacgcgccagcgcggcgaacacctcaccgtagcccagcagctgcgccagcgtagtgtgcggcgcgatctccggctgctgcgcaacgtaagctactgcggcatgagattcaacgtgtccattgcccggcagatccaatccggcgatcaggcgcagcagctgggttttgccaacgccgttgcgccccaccaggccgcagcgcgaccgatcaaaagcgagatccagcgggccgaacagcgtttcgccgtcagcaaattggcaggtcagttgatgtaaaacgaaataaggggactgcactaaatgagccataagcactcctgaatgagatcaaaacatccccacagggcgcgagagcgcacggcgtgggaccagatatcaacaggcgtggttgttcattttcggttatggctccgcagagagaaggaatttgcaacgcgtaaaggctaaccgatcttttgttcgttatgcaaacagagtctgagattcatgacatctatcacattcggcgcaacgcagattcccaagcggcgcgacaacggctagatttatctcatccgaccacttgtgttcacataattataacaacgggccccgatttcacccgatggagagtgcaatgagcaattaccctcacctgctggcgccgctggatctcggcttcaccaccctgaaaaaccgggtgctgatgggatcgatgcataccggcctggaagagctgcccgacggcccgcagcgcctggccgcgttctatgccgagcgcgccgccgccggcgtggcgctgatcgtcaccggcggcattgccccgaacgaacagggcgtggtgtttcgcggcggttcgctcctcaacagcgaggcgcaattgccccaccaccgcccggtgactgaagccgtccaccgggcgggcggcaaaattgcgctgcagatcctgcacaccggccgctacagctatcaacccaagctggtggccccttccgcgctgcaggcaccgatcaacccgtttacgccgagcgcgctcagcgaagcggagattgagcagactatcgccgacttcgcccgctgcgcggcgctggcgcagcaggctggctatgacggcgttgaggtgatgggatccgagggctatctgatcaaccaattcttgacgacgcgcaccaaccagcgcgacgaccaatggggcggcagcttcaccaatcgcatgcgcttcgccgtcgagaccgtcagggcggtgcgccaggcggtgggcccggaattcattttgatctaccggctatcgatgctcgacctggtggaagacggctccagctggcaggagatcgagcagctggcgctggcgatcgaacaggcgggcgccacgatcatcaataccggcatcggctggcacgaagcgcgtattccgaccatcgccaccatggtgccgcgcgccggattcagctgggtgacccgcaagctgatgggcaaggtcagcatcccgctgatcaccaccaaccgcatcaacgatccggcggtggccgagcaggtgctggcggacggctgcgccgatatggtgtcgatggcacgcccgttcctcgccgacgccgcctttgtgcagaaagccgccgaagggcgcgccgacgagatcaatacctgcatcggttgcaaccaggcctgtctcgaccagatctttgaaggcaagctgacttcctgtctggtcaacccgcgcgcctgccgtgaaaccgaaatgccgctgacaatggcggaaaagccgaaaaaactggcggtggtcggcgccggccccgccgggctggccttcgccaccaccgccgccagccgtggtcatcaggtgacgctgttcgacgccgccgagcagatcggcggccagttcaacatcgccaagcagatccccggcaaggaagaattccatgaaaccctgcgttacttccgccgccagctggcgctgcgtgaagtgacggtcaggctgggcgtcaaggtcgaagcggcggatttaagcgaattcgatgaggtgatcctcgcctgcggcatcgtgccgcgcaccccggacatccccggcatcgggcacgccaaggtgctgagctatctggacgtgctgcgcgataaaaaaccggtcggccagcgggtggcgatcgtcggcgccggcggcatcggcttcgataccgccgaatacctcagccagcacggcgtgtccagcagcctggatcaggcggaattcaaccgcgaatggggcatcgatggccgccttgaacagcgcggcgggctggcggcgcaaggcccgcaggcgccgcgcgccgcccggcaaatctacctgttgcagcgcaaaaccagcaaggtgggcgaaggcctgggcaaaaccaccggttggatccaccgcgccagcctggcgatgcgcggcgtgaagatgctcaacagcgtcagctatcggctgatcgacgacgaagggctgcacatcacccgcgccgagcaagacagctgcctaccggtggacacggtggtcatttgcgccgggcaggaaccgcgccgcgaactgcagcaaccactgctggcgatggggaaaaccgtgcacctgatcggcggcgccgacgtggccgccgagctggacgcccgccgcgcgatcgatcagggtacgcggttggcgatggcgctgtaaaaaaggggcgcccggcgcccctgatattgatgacaaacctcatccccatgccgggttggcagagagcagcgaatagagaacaaggaaaatcaatttattgattttcggctgatatccacaaagggggaaaaaccacgctttttccccctttgtctacagcctgaggggcgcccggcgccccttgttattcacgctcagcgacgcgcgccggatttcaccgctctaaggatcacgaacttcttgttcgaggccaccagcgtgcagttgccgaacaggcgcttgagcttctgatggtagtcgaggtgacggttgccgacgatgcgcagttcgccgcccacctgcaggcagcgcttggcgtcgcagaacatctgccaggcggtgtgatcggtaatggcgtgttgctggtggaacggcgggttgcacagcaccgcctgcacgctttcacgctcgatgcctgccagcgcgttgttcacctcaaactgacagcggtccagctcttgcggcaggttgtgctccacgttcagctcgctggaggccaccgccatgtaagattcatcgacgaaggtcacctgcgcttccgggttttgcgccagcgccgtcaggccaatcacgccgttgccgcagcccagatcgacgatatggccgttcaggccgcgcggcagatgttccataaacaggcgcgcgccgatatccaggctgccgcgcgagaagacgttggcgtggttatggataagccaatcggtgccgtccagcgtccagtcggtggtttccgccgccgccggcgggacgatatccgccgcctggcagaagatcagacgcgctttcttccacgccaggctggtgcgcgtcgggcccagcactttttcaaacagctgcatcgtcgaagtgtgcacgtcgcgcgctttggcgccggcgacgatcagcgtgtcttcggtcacgacgtggcgcagcgcgcgcagctgctgttccagcagcgccagcgctttcggcacgcgaatcagcaccaccgccggcgccgccggcagctcggccaggctgtccagcagtgtgacctgctcaggatccagaccgttgagtttgaggttgtggcgcgtcgccagctggctcatgtacgagtcgctgacgctgtaagggcgatgcgcgtgcaacgcacaggccagggtgccgaagttatcgttgaaaatcagcaccgggcggccgccgatatctacgttttcaagctgttgcagcagatattcgtccgccgcttcccacgcctgcagttgggtggattcttcctgttggggataacgctccagctcaagttgctgtgttcccagatcgagttggctcattgcccctcctgactgataaaatttgggctgtttatcccctaaaaacgcccgtcagtaaaatgttttttcggataaattgcgtattgcgccgcgtatctgaaaacccgcgtcccttttctcctttaacaacattaacctttccctcccaagcacccatgtcgacgtttttttaacctgacgaggtgtaactttaaatgttacactgccagtccctatggaagggggaaagcatgattaaatctttccgcgatcgctatctggagcagttctatctggaaggcaaacgcagccgtctgatccccggcgtgctcgagcggcagttggccagaaagctcgatatattggccgccgcgcagcaagagcgtgatttgcatcaccccacgggtaactattacaagcggctatccgggccatttcagggatggtcaagtctgcacgtcaatatgcactggcggctgatgttccagtggcggcatgatgccgctgaaaaaatttacctcgatcctcaccaagatacctgaacgagggggaacctatgttggaaaccacgactcgcgaacccaccacggtgggggaagtgctgcaggaagagtatttaacgccgttgggcatcggccaggaagaactggcgaaggtactgggcgtcacccgtgccactgttaaccgcctgtgcaacgggcatcgacgcatgagcgttgccgaggccaacctgtttgccgacctgttcgaaacgaccgccgacttttggctaaacctgcaggcggcacacgatcgctgggaagccagacaggccgatgcgcaacgtgtgcggctgcggccaatcaaagaaatactgggacgcaatatcactcatgcatgacatcgaactcgcctacctgcaaggctacccaacgcatctgcaaagccaggtgcagcaactgatccatcagaatcggctgggagacgtgctgctgcagcgctatccgcaggtgcatgagtgcaccaccgacaagtcgctgtatcagtttaccgtcgatctgaaaaaccagtatctgcgcaacgcccagccgctgagcaaggtggcctatgacagcaagatccacgtcatgaagcacgcgctgggcctgcacaccgccatctcgcgcgtgcagggcggcaagctgaaggccaaggcggaaatccgcgtggcgacggtgttcaaggtcgcgcctgagccgttcctgcgcatgatcgtggtgcatgagctggcgcatctgaaagagaaagatcacaacaaggcgttctacagcctgtgctgccacatggagccggattaccaccagctggagttcgatacccggctgtatctgacgcacctttcgctgttcggcgagctgtatgcatagcgagtgagggcgtgataatctgcggttttaggctggaccggagctcgctatgattcgctttgccgtcgtcggcaccaactggattacggaacgttttattgatgccgcccatgaaagcggcaaactcaagctgagcgccgtgtattcacgctcgctggaacaggcgcaggcgtttggcgccaactatcaggtcacgcagtttttcgactcgctcgaggcgatggcccagtccgatgccatagacgcggtgtatatcgccagccccaattccctgcactgcccgcaatcgctgctgttcctgcgccataagaagcacgtgatctgcgaaaaaccgctggcctccaaccagcgcgaagcggaacagctggtagcctgcgcgcgggaaaaccaggtggtgctgttcgaggcgttcaaaagcgcctatctgccgaattttctggcgctgcaacaggcattgccgaacgtcggccggttacgcaaagcctttatcaactactgccaatactcttcgcgctatccgcgctacctcgccggcgagaaccccaacacctttaacccgcagttctccaacggctcgatcatggatatcggctactactgcctggccagcgcggtagcgctgttcggcgcgccgcagtcggtgctcgccagcgccacactgctcgataccggcgttgacgcccacggcaccgtctgcctgaactacggtgatttcgacgtcacgctttcccattccaaggtcagcgactcggcgatccccagcgagatccagggagaggaaggcacgctgattatcgacaagatttccgagtgtcagggcgtggcgctgacgccgcgcggcggcaaccgccaggatctgagccagccgcagcacatcaacaccatgctgtatgaagcgctggccttcgctgagctggtggaaaatcaccgggtggaacatccagggctggagaattcgctgatcgtcgcccgcctgctgaccgatatccgccgccagaccggcgtcgtcttccccgccgacggagaatgagatgaaaccgttgctcgtgatgcaaaccggcgacgcgccgcaggccattcgtcaggaattggccaactttgatggcatgttcctgcaacaaggcaatatcgacgccgaacgcgcgcacatcgtgcacctgcccgccggcgaacggccgttgccgcctgccgcctattgcggcgtagtcatcaccggctcgccggcgatggtgaccgaacggctgccgtggagcgaggaagccgccgaatggctgcgccaggcgatggcgatcaaactgccgctgttcggcgtctgctacggccaccagctgttggcctacgcgctcggcggcgaagtgggctaccacccgcagggcatggaggtgggtacgctggagatcgaactgctgcccgccgcggccgacgatcggcggctcaccctgctgccgccgcgcttcaaggccaacctgatccactcgcagagcgtgctgacgccgcccgccggcgcgcagacgctggcgcgttcgcagcaggacgcgcaccaaatcctgcgctatggcgatcacgccctgaccacccagttccacccggaattcaacggcgcggtgatgagccagtatctgcagtggctcggcgagctgcatcccgagcagcaggcccgctaccaacagcaacaacaacaggttagcgacacgccattcagccgcctgctgctgcagggattcgtcgtcagcctcggcgcgcaaaaagcgatggccggttaacgcgattcacgttgaccgccgacacattttgcattactttctgctctgcaaaggggagtaacttcattgccggtcaatcgtcattacgatgcgcaagcatccggttaccgggcaacctgatgtcaaaggtgtaaccaccttcatcaacgttgtaagtgagaccttgccggaaggcgaggtttgcttgcagcgttcacagagcggctggcgtcttccgacgttggccgtttttgtttttgaaggatacctctgatgatgaattccgttggcacaccgtggttatggggcagctttgccgccgttatagtcgtgatgctcgcaatcgatctcctgttgcagggccgtaaaggcgcgcacaccatgactatgaagcaggccgccagctggtcgctggtgtgggtcagcctctccctgctgttcaacttcggtttctggtattacctgaatgaaaccgccgggcgcgccgtcgccgatacccaggcgctggccttcctgaccggctacctgatcgaaaaagcgctggcggtggataatgtgttcgtctggctgatgctgttcagctacttcgccgtgccggccaacctgcaacggcgggtgctgatctacggcgtgctgggggcgatcgtgctgcgtaccatcatgatcttcgccggcagctggctggtcagccagttccagtggctgctgtatctgttcggcgctttcctgctgttcaccggtataaaaatggcgctggcgaaggaagatgactcggcgatcggcgacaaaccgctggtgaaatggctgcgcagtcgcttgcgcatgaccgacagcctggaaggcgagcgtttcttcgtgcgccgcaacggcattctgttcgccaccccgctggtgctggtgctgatcctggtggaactgagcgacgtgattttcgcggtggacagcattccggcgatcttcgccgtgaccaccgatccgttcatcgtcctgacctccaacctgttcgccatcatgggcctgcgcgccatgtacttcctgctggccaacgtggcggaacggttctcgatgctgaaatacggcctgtcggtgatcctggtatttatcggcatcaagatgctgattatcgacttcttccacatcccgatcggcgtgtcgctcggcgtggtggcgggcatcctgacgttcaccttgctgatcaacgcctgggtcaatcaccgcaacgatcgcctggcgaagaaataaccataatctgttatccggggcgctagtcgccccgtgattgtttggcaattcccgcaaaacgccaaacgttattgcgatcacacaaatgtaaccagtatgttatcaagtgttgatccgcgctcagaatttcaccctcgcctctttccaacatcattcgattgctgaatactgattcggcaaacacacttagttacagaatcatataaagctgcctggcgtcgttcccgccgcggcggccagataacatcaggaagaaagcactatgcaaaaactactacaaaagatcacgcagggcagcctggtcaaacaaatcatggtcggcctggtggccggcattctggtggcgctggtttcaccggcggcggcagcggcggttggcctgctcggcaccctgttcgtcggcgcgctgaaagcggtggcgccggtgctggtgctgattctggtcatggcctcgatcgccaaccataaacaggggcagaagaccaacattcgcccgatcctgttcctctatctgctgggcacctttgccgccgcgctggtggcggtggtcgtcagctttatcttcccttccacgctggcgctgaccaccggcgcgacggacattaccccgccgggcggcatcgtggacgtgatgaagggcctgttgatgagcgtggtggccaacccgttccatgcgctgattaacgccaactacatcggcattctggcgtgggccgtcgggttggggctggcgctgcgccacgcttccgaaaccaccaaggggctgatcaacgacatgtcccatgcggtcacgctggtggtgcgcgcggtgatccgctgtgcgccgctcggcatcttcggcctggtggcctccacgctggcggaaaccggcttcggcgcgctgtggggctatgcgcaactgctgatggtgttaatcggctgcatgctgctggtagcgctggtgctcaacccgctgatcgtttactggaagatccgccgcaacccgtatccgctggtgttcgcctgcctgcgcgagagcggcgtgaccgccttcttcacccgcagctccgccgccaacatcccggtgaatatggaactgtgcaagaagctgaacctgaatgaggacacctactcggtttccatcccgctgggcgccaccatcaacatggccggcgcggcgatcaccatcaccgtgctgacgctggcggcggtaaacacgctgggcatcgcagtggacgtcccgaccgccctgctgctgagcgtggtggcggcgctgtgcgcctgcggcgcctccggcgtggccggcggttcgctgctgctgatcccgctggcgtgcaacatgttcggcattccgaatgacgtggcgatgcaggtggtggcggtcggctttatcatcggcgtcctgcaggattcggcggaaaccgccctcaactcctccaccgacgtgctgttcaccgccgcggcctgccaggcggaagaccagcggctggcgaacgaagatccgctgaaggtgcgttaatcgcgcgttgcttcatcaaaaaggcgctccttcgagcgccttttttgtcagccttacagcgtcaccccgcttttaaagatcgccagctcgcggaagtcgttggtttcattacgcgccggacgcccgttagcgatctcgacaatcagatcgatgaagcggctgagcaacgtctccatcgccacgccgtggatcaggctgctggcgtcaaaatcgatccagtgcggtttcttcgccgccagctcgctgttggtggccagcttcaccgtcggcacaaagccgccgtacggcgtgccgcgcccggtgctgaacagcaccatatggcagccggcgccggccagcgcgctggtcgctacggcgtcgttgcccggcgcgctgagcagattcagccccggcacgcgcagccgctcgccgtatttcagcacgtcaaccacctggcttaaccccgccttttgggtgcagccgagcgatttctcctccagcgtggtgatgccgccggccttgttgcccggcgacgggttctcataaatcggctgctgatgggcgatgaaatagcgtttgaaatcgttgatcatgtcgacggttttgtcgaaggtctccccatcgcggcagcggctcatcagaatgcgctcggcgccgaacatctccggcacttcggtcagcaccgtggtgccgccgttggcgatcacataatcggagaaccgccccagcagcgggttggcggtgatacccgacaatccgtccgaaccgccgcactccaggccgaacttcagctcgctcaggcggcccggctcgcggcgatcgtggcgcatctcccggtacagctcgtgcaacagcgccagcccggcttccacttcgtcgtcctgctgttggcacaccataaagcgcagccgccgctcgtcctctatccccaacgtggcgcgaaaggcatccacctgattgttctcgcaacccagcccgatcaccagcaccgcgccggcgttgggatggcgcgccaggttctgcagcatgatgcgggtgttggcatgatcctgccccagctgcgagcagccgaacgggtgactgaacagatgcacgccgtcgatcccctctgcctgcgtttgctgcaaaaagcgttgctggatctggcgagcgataccgttgacgcagccgacggtcggcacgatccacagctcattgcggatccccacttcgccgccggcccgtcggtacaactgcacctcgcgatccgcggcctgcggcggcaacgtcgggaactgcggttggtaacggtagctgtccagatcgctcaggttggttttggcgttttgcgaatgaatatgctcccccggcccgatggccgcgagcgcatggccgatcggctggccatatttgatgatgtcctcgtccttggcgatcgggccgagcgcaaatttgtgcccgcgcgccaccggctgcgccagttggatgaccgcgccttccagctcaacgcactctccggcagccagatcgcgcagcgccaccgccacgttatcctgctcgtgaatctttatcgtactttgcataaaccggtcccggataacggctacgccagttcaatggcgaaatagtctttggcgttgtcgaagcagatgtttttcaccatttcgcccagcagcgcgatatccaccggcgcttcgccgtccgccacccaacgaccgatcatctggcaaagaatgcggcggaagtattcatggcgcgtgtacgacaggaagctacgactgtcggtcagcatgccgacgaagcggctcagcagcccgagctgggccagctgcgtcatttggcgctgcatgccgtccttctgatcgttgaaccaccagccggaaccgaactgcatcttgcccggcgtgccttccccctggaaattgccgatcatggtgccgatcacttcgttatcgcgcgggttgaggcagtagagaatggttttcggcaggccgccctgccgcgcctgggcatccagcagccgcgacagcggctccgccagcggccgatcgttgatcgaatcgaaaccgatatccggcccgacggcggccagcatgcggctgttgttattacgcaacgcgccgatgtgatactgctgcacccagccgcggcgccggtattcgccggccaggaacagcagcaccgcgcttttgaactgggcgctctgttccggcgtcggcagctcgccgttcaggcggcgcagcaggatcgcatccagcgccgcttcatcggcctcgccgaacaccaccacgtccagcgcatggtcggccaccttgcagccgtgggcggcgaagtgatccatgcgcttgtacagggcgtcgcacagcgcgctgaagcggccgatgacggtatccgccgccgcctccagctgtcgcagatagtcattgaagcccggtgcatcgacagtgaaagccttgtccggccgccagctcggcaataccttgatatcgaagccacgatcgtcggcgatcgcccgatgatggcgcagatcgtcgatcggatcgtcggtggtgcccaccattttcacattcatctgccgcatgatgccgcgcgcgcgaaactcatcctgcgccagcagcgcattgccgcactgccagatctcatccgccgtggccggcgacagcagcgtatccgtgatgccgaacggccgacgcagctccagatgcgtccagtgatagagcgggttgccgatggtatgcggcaccgtggcggcccaggcgtcgaatttctcacgatcgcccgcatcgccggtacacagccgctccgccacgccgttggtgcgcatcgcccgccatttatagtgatcgcctcgcagccagatatcgtacaggttgctgaagcgggtgttctccgcgatctgctgtggcggcaaatggcagtgataatcgaaaatcggctgtggcgccgcatagtcgtgatacaagcgccgggcaaattcgttgtccagcaggaaatcttcgctcaaaaacgtcgccatctcgggctccttacttgccgtgcggcacggggttcgaatcacaaaagttatcacaccaattttcacaggcgtccagcaaatttttcccatgagctgttggtttaaggtcctttaatccctttttcgctcaattttacggcaagtgtgcggcgcaaacgcactatttcaccggcgacagtatcgctcaggcgaataattccttttgtgatatcactcaacttttaaacctgtatgacaggttattgtctcgccagccgcatcgacggccacaccttcaaacggggagacatttcggatgcgtaaaattaaagggttacgctggtacatgattggactagtgaccatcggcaccgtgctgggctacctgacccgcaacgccatcgccgtcgcggcgccgacgctggaagatacgctgcacatcaccacccaacagtattcctatatcgtcgccgcctattccgcctgctacaccgtgatgcaaccggtggcgggctacgtgctggacgtgctgggcaccaaggtcggctacgccatgttcgccattctgtgggcgctgttctgtatgggcaccgcgctggccaacagctggggcggcctggcgctggcgcgcggcgcggtcggcatggcggaagcggcgatgatccccgccgggctgaaggccagcagcgagtggtttccggccaaagagcgttcgatcgccgtcggttatttcaacgtgggttcatcgatcggtggcatgatcgccccaccgttggtggtatgggccatcgtggcgcacagctgggaaatggcgttcatcatcaccggcgtgctgagcctgatctgggccatttgttggctgctgttctacaaacacccgaaagatcagaagaaattgagccaggaagagcgccgttacatcctcgaaggccaggaagcccagcaccagacctctaacgccaaaaagatgtccgcctggcagatcgtgcgcaaccgccagttctggggcatcgcgctgccgcgctttctggcggagccggcgtggggcaccttcaacgcctggatcccgctgttcatgttcaaggcctacggttttaacctgaaagagatcgccatgttcgcctggatgccgatgctgttcgccgatctcggctgcatcgtcggcggttatctgccgccgctgttccagaagtatttcaaggtcaacctgatcgtctcacgcaagctggtggtgacgatgggggcggtgttgatgatcggccccggcatgatcggcctgttcaccagcccttacgcggctatcgcgctgctgtgcgtcggcggcttcgcccatcaggcgctgtccggcgcgctgatcaccctctcttccgacgtgttcggccgcaatgaggtggcgactgccaacggcctcaccggcatggcggcctggaccgccagcacgctgttcgccctggtggtcggcgccctggcggacaccctcggcttcagcccgctgttcgccgcgctgtcggtcttcgacattctcggcgccatcgtcatctggacggtgttgcaaaaccgtccggccgccgaaacccagccggccacgctgcaaccggccccggcgcgcagctgatcccgccgcccggccgccgcgccgggcctcttgctcctctggcagcggtgccgaataagtggtataacaaatccgatggccacgcgccccttcccaccgcaccgtatagagcattcactatggaattcaccgaaaccagacgcctgtatcagcaactggccgccgagcttaagcaacgcatcgaaagcggccgctacccggtaggcgacaagctgccggccgagcgatacatcgccgaagagatgaatgtcagccgtaccgtggtgcgcgaagcgatcatcatgctggaagtggaaggctatgtggacgtgcgcaagggatccgggatccatgtggtgtccaaccagcaaaagcacctggtggtgccgggcgacagcatcgagttcgccaccgccggcccgtttgagctgctgcaggcgcgccagctgattgaaagcaacatcgccgagttcgccgccacccaggtgaccaaacaagatatcgtgcagttgatggagatccaggagcacgcccgtaaagaggatcgcttccgcgactcgcagtgggatctgaagttccacgtgcaggtggcgctggccacccagaacaccgccatggccaccatcgtggaaaaaatgtgggtgcagcgggtcaacaacccttactggaaaaagctgcacgagcatatcgacgaacgctcgatcgccagctggtgtgacgatcacgatcagatcctcaaggcgctgatgcgcaaagacccttacgccgccaaactggcgatgtggcagcacctggaaaacaccaaacagatgctgttcaacgccaccagcgatgacttcgaatacaacgccgatcgctacctgtttgccgagaatccggtggtgcatctggatggcgtgaaccacgagcagaaatagccacggcggtcaaaaaccgtcggcttatgtcaggtaatgtaaaatccgctgaatcgatgccggaaccgccgtttgccgtgtactatttcaccgtcggcaacgtagatttccctgttgccaatcgtgctattttggtagagttagcccacttttttacccattgctgcgggggcgggacgcgaataaatgcgctggttgtttgccatgctgattgctgttttctgctggaccggttcggtctccggccaacagctatgcgtggcgtcacccaagccaacccccagcgcgctgagcagcctgccgctgctggcggagccggcgctttccccctatgatcatgtgtatcgggcgccggccgaagcgcgccgcaaagcccccggcaagttgccgctgctgctgcccagagcgcactctttctccggttcgctgctcgcatcctccctgccggcgccggtctataccctggccgcagagccgggttaccgaattcgcttcccccgccaggacaccccggctcccaaccggcttgcccaggtcgactggatgctggacgcttccaggcaacagagtcgccaggccggttggaaagaaagcaacatgcagtaccgtggcacgctgacttaccacctatgaccggtgtcgcaccgcttagaaaccttaaagcaacgccgtttcatcgttatcagcactcaggatcgccgcgcgctttcagctcacgcccgctccgccgctgagataaaaataaacaatgacgttttaggaacaccggatggacatcattaaagaactgatacatgccttatggcagcaggattttgagacgctggcgaacccctcgttggtgtggaccctctacatcctgctgttcatgatcctgtttttggagaacggcctgctgccggccgctttcctgccgggtgacagcctgctgatcctggtcggtgtgctgatcgccaaaggcaccatgggcttcccattgaccatcgttatcctgaccgtcgccgccagcctggggtgctgggtcagttatatacaaggccggtggctcggcaatacgcgaacggtgcaaggctggctttcgcatctgccggcccactaccatcagcgtgcacataacctgttccaccgtcacggcctttccgccctgctggtcggccgcttcctggccttcgtgcgcaccctgctgccgaccatcgccggcctgtccggcctgagcaacgcacgcttccagttcttcaactggatgagcggcctgctgtgggtcttgatcctgacgacgctgggcttcgccctggggaaaacgccggtgttccgcaagtatgaagatcagctgatgttctgcctgatgatgctgccgctggtattgctggtggtcgggctggtcggctcgctgatcgtgttgtggcgcaagaagcgcgccaacagccagaatccggggaaaggggcgtgacagcaaagcgcccgcgctggcaatacgtcctgatgatcgcgctcgccctgctggcgttggcgacgctgttggtgccctgcatggtgcgcaccgagagcgagctgcgcatccgcgccagccagcaagggctgtcgctgcccgacggcttttatgtctaccagcgcctggatgaacgcggcatccgcatcaaaagcattacgccggaaggcgatggcctggtcatccgtctggattcgccggagcagcagttgctggcgcgcgaagctttgcaaaccattctgccacccggttaccacatcgcattgagcgagtcccccgtgccgtcgcattgggtgcgcgaatttgcgcgctccccgctcaatctgggataatcccccttcatatgaaggggtttcctttcattgccataatcttcattttcattcgcatcgattagctcaagaattaatcagtcagcactgggtcacggctgattctttgggggctcgccggtttcatgactatgctgaagggtaacttcagccggcgatgaacgccctcctctcgcgctgccgccttcggcagccaggaaagcggatgcctgttcaggcatcccatgaacaaggaactgaaagatgaaattacgccactccctgttactgctgttgccactctgcacgctgccggccctcgcttcggccgcagagggcggttgcgccgccaaagcgcaaaacatccaacagcaaatcgactacgccacccaacacggcaacacccaccgcgtggacgggctgaaaaaagcgctgagcgaagtgcagactcactgcaccgaagccggcctgcaggccgaacgccagaaaaacatcgcagagaaacagcgcaaggtcgaagaacgccggcaggagctgaaagaaacgcagcaaaccggcaagctggacaaggtcgccaagaagcagcaaaagctggcggaagcgcaagctgagttgaaacgcgcccaggcggaataattttttacaccagcggatttatcgatgagagccccatcacacgggatttcttaagcatatggaattgatgtctggtgttatctgctggccatcacccctttgctccggcgaaaaaatccgctatgttaaaagtctgtcgaaataaacgttaaggaataatcacatggcacatgattcaaatgcagaaaacttacgcgctgaactgaagtccttagccgatacgctggaggaagtgctgaactcctccaccgacaagccgaaagccgagctggagaagctgcgttcgaaggcggaaggcgcgctgaaagagacccgcgctcgcctgagcgacgccggtgacaagctggcttcgcaaaccaaacagatcgccggccaggccgacgactatgtgcgcgacaacccgtggaccggcatcggtatcggcgcggcggtcggcgtggtgctgggcgtgctgctcgcgcgtcgctaatcatggctgaacaaccgcaagtgcgcgcgcagggccccgccaaaggggttctggatatcggtcagcgcatcatcacgatcctggtcggcatggtggaaacccgtgtccggctggcggtcgtcgagctggaagaggagaaagccaacctcattcagctgctgatcatggccggtatgacactgctgttcaccgccttcggtttgatgagcctgctgatcctgatcttctgggccatcgatccggtctatcggctggtggcgctgggcgcgacaaccggcgtgctgctgttcctcgccgtagtcggcaccatctggacgctggtcaaggcccgtcgcaccacgctgctgggcgccacgcgcaagcagttggagctcgaccgcgccgaactggagcgcgagccatgagccgccgccgctacctggaatggaaaaaagagaggctgattcgccagatccagcaacagcgtctggatctggccgaacacaagtctttgtggctggaaaaaaccgaacgcattgaccgcggctggcagaccgtttttggcctgcgccgctatctggtactcggttccagcgtcatggcgctgtacggcatccgccaccccagcaagatgatccgctggtcgcgtcgcgctttcggtgcctggagcgctatccgactgtttaaaaagaccttctccgccaagtaagccccgcgtttttccttcaaacatcctgttgctctgccctcgttttccccttaaaacagcgctgtttatcccgagggctgggcaacctgctgacaagcgtcagtttattagcacgctaaagattcagattttttgaaaaattacgacagttttacttgctaacaacctgagcacttcccgattaacattcactccatcaatacgatatgggccgaacagggtgagagacccgatataccgcccgttgatatgactaccgccgaacaggcacacaaaaacactttggagtagatgatgaaaaaattagaagatacaggtttgctggttgctcgtatcctgatgccaatcctgtttatcgtggcaggctacggcaaaatgggtgacgcttatgccggaacccaacagtacatgcaatcgatgggcgtgcctggcttcttgctgccgctgaccattctgctggagtttggcggcggtctggcgatcctgttcggcttcctgacccgcaccgtggcgctgttcactgccggtttcaccatcctgaccgcgctgctgttccacactgattttgcggaaggcgtaaaccagctgatgttcatgaaaaacctgaccatcgccggcggcttcatcgtgttggcggtcgcaggcccgggcggcttcagcatcgaccgtcttctgaacaagaaatggtaatctaaactgtcattcagggcccggcatgccgggccctgtcgtttttcactcggacaccaaggagattcccatgggacaactcgtcgatggcgtttggcaagacatctggtatgacacgaaatctaccggcggccgtttcaaacgttcaaccgctcagtttcgcaattgggtgaccgccgacggtcagcccggcgaacacggcgcgggcggcttccaggccgaagcgggccgttatcacctgtacgtttctctcgcctgcccctgggcgcaccgcacgctgctgatgcgcaaattgaaagggctggagcagatcattccggtctcggtggtgcacccgctgatgctggaaaacggctggaccttcggccaggattttcctgaaaccaccggcgatccgctgtatcacgccgacttcctgtaccagatctacctgcgggcagacccgcactacagcgggcgcgtgaccgtgccggtgctgtgggataaacagcggcaaaccatcgtcagcaacgaatccgccgacatcatccgcatgttcaacagcgcgtttgacggcgtcggcgctcgggctggggactactacccgaccgatctgcgcggcaagatcgatgagctgaacggctggatttacgatcaagtgaacaacggcgtgtacaaggccggtttcgccaccagccaggaagcctatgacgaagcggtcaacggggtattcaacgcgctggagcgccttgagcagatcctggggcaacatcgctacctgaccggcgatcggctgaccgaagccgacctgcgtctgtggaccacgctggtgcgtttcgatccggtgtacgtcacccacttcaagtgcgacaaacaccgcatcagcgactatctgaacctgtacggcttcctgcgcgacatctatcagatgccgggcatcgccgagacggtcagcctgccgcacattcgcaaccactactaccgcagccacgccaccatcaacccgcacggcatcatttccatcgggccggcgcaggatctggacgagccgcacggccgcgaccagcgcttcggttaaggcgaaaaaaatccccttgccgcccggcaaggggatgtcatcccaccgatgttaacgttgcgcgaacaggcgcgggatttcgcgcaggaaccaggccttcgcctcccccatgctgtcgcgccgccaggccatgatgatgtcggcttcgcggctgtattccggccccaccacgcgcagccggccggcttcgatatctttctccaccatcggatacggcatggtcgccacccccaacccggccagcagcgccagacgtttgtcttcaatggtgctcaccgtcaggcgctgttgcttgtccagcagctgtacggtcaacaccgggcgctcgcgagcggtatccgccaccgcgatgccgcggtatttcacgcgggtcacctcggacaacggctccggctcctggtggataggatgatccggcgcggcgacataaacgctcatgaccttgtacagtttgcgggtgttgatctccgaggatgcgcggaaatgcatatccggcgcgatcacaatgtcggcgcgcccctgttccagccgctcccaggcgcccgccagcacttcggtgaaaatcgacacctgggtgttggccttcagcgccagcttgtccaccagcgggaacagcaggcttggcggcgacagcgcttcactgacgatggtcaggtgggtttcccaaccgcgcgccagcgcctcggcgtcggtggtcagcttatcggccgcctccagcagcacccgcccgcgctccagcaacatgcgcccgacgttggtgaacttggtgcggtggcccgaacggtcgaacagcaccacgtccaattcttcttccaatttttgcatggtgtagctgagcgccgacggcacccggcccaattcgtcggcggccgcggcgaaactgccacgccggtcgatcgcatccatcactctcagcgcctcaagcgtgagcgcccgatctctggccatcacatccctctgtcaggaaatttgaatatgccgaccagattaactggctaacaatccgacgtccagatgcttaccatttggataatgaatttagagagccgattgccatgattacatgcagaacagcacaacaatgcgggcaagctgactttggttggctgcaggctcgctacaccttttcctttggtcactacttcgatcccaaactgatgggctacgcctcgctgcgggtactgaatcaggaggtgctggcaccgggcgcgtcgttccagccgcgcacctatcccagcgtggacatcctgaacctgatcctgcagggcgaggcggagtaccgcgacagcgacggcaacaccacgcgcgccaaagccggcgaagcgctgctgttggccacccagccgggcctgagttacagcgaacagaacgtcagcagcgatacgccgctgacccgcctgcagctgtggctggacgcctgcccggaacgcagcaacgagcgggtgcagcgcctggcgctgccggcggcaggcaacctgctgctggcctcgccggacggcgcgcagggcagcctgcagctgcgtcagcaggtttggatccaccatctcgatctgcagccgggcgaagaacaaacgctgacgattaacgggccgcgcgcctatttgcagtcgattcacggcaccatcgccgctaccggcgagcgccacgaagcgcaacgcctgacctgcggcgacggcgccttcgtgcgtgaggaaaaccgcctgacgatccgcgccgaaacgccgctgcgcgcgctgctgattgacctgccggtgtaagccggccgaaaaacgaaaaaccccgcgcaacaggcgttgcgcggggttttcttttgtcgagggagttgaccggtaagccgggttctgtcgtggacagtcattcctctaggccagcaatcgctcactggctcaagcagcctacccgggttcagtacgggccgtaccatgtgaacccctatttggccttgctccgggtggagtttaccgtgccacgaactgttgccagccgcgcggtgcgctcttaccgcaccctttcacccttacctgatcccgcttgcgcgggccatcggcggtttgctctctgttgcactagtcgtaggcttgcgcctcccaggcgttacctggcaccctgccctatggagcccggactttcctcccctccatctgtctccccgaagaggacggcaatgaagcggcgactgtctggtcaactccggcgcggatagtagcgtcgcggcggcggcaggtcaaccgctttacggctgttgttgctccagcgcgtgcttatacagcgcatttttcttcacgccgtggatttccgccgccagcgccgccgcctttttcaacggcagctctttttgcagcagcgccagcgtgcgcagcgcctcgagcggcaacgcatcctcctgcgccttgtggccttcgacgatcagcaccatctcaccgcggcggcgcacttcatcttcctgcacccacgccagcagctcgcccaccggcgcgccgtggatggattcccaggttttggtcagctcgcgcgccagcacgacatagcgctgcgggccccaaacggtgaccatgtcctgcaggctttccagcagacgatgggtggattcgtagaaaatcagcgtgcgcggttcctccgccagcgccatcagcgtatccttgcgccccttggttttcgccggcagaaaaccttcgtagcaaaaacggtcggaagcgacgcccgcggcgcacagcgcggtggtggcggcgcaggcgcccggcagcggcaccacgcgaatgccggcctcgcggcagcggcgcaccaggtgataaccgggatcgttgatcagcggcgtgccggcgtcggaaaccagcgcaatgctttggccttcctgcagtttcgccagcagctgctcggccttttgctgttcgttgtgatcgtgcagcgcgaacagacgcgcgttgatcgcgaagtgttgcaacagcaatccggtatggcgcgtatcttccgccgcgatcagatcaacgcttttcagtacctctaacgcacggtgggtaatatcgcccagattgccgataggggtgggcaccacatacagcgttgatgcagaaatgactgattgttggtgttgattcattgtttcatccgggttgccgatttaatattgagcatcttgaaaaaaacatcactggatacagtatgctttcctcaacattcgttcgtaccaaagcagggcgttccaagcctgtccgactgaccgcagtcatcgccgccgcccttttcctggcaggctgtccaagtcgggccccgcaaacgccgcccgccaatatacaggacgaagcgagcgccagctccgattactacctgcagcagttgcagcaaagcagcgatgataacaaggctgactggcaattacttgctattcgcgccttgctgcgtgaaggaaaactgccgcaggccggcgaccagttgaatcaactgccgaaaaatctcagcggcgcgcagcagaccgaacgccaattgctgaccgccgaactgcagatcgccaacaagagctacgtcagcgcccgcagcacgctgggccacctggacagcggcgcgctgtcgccgaatcagaaggtgcgctactaccaggcgcagatcgccgccaatcagggcaaagcatcgctgccgctgatccgcgcctatatcgcccaggagccgctgctgaccggcaaggcgcaccaggacaatctggatcaaacctggcaggcgctgctgcagctgacgccgcaggagatgaacagcctggtgatcaacgccgacgagaacgtgctgcaaggctggctggatctgctgcgcgtttatcaggacaacaagcaggatcccgatctgctgaaggccggcatcaaagactggcagaaccgttatccgaagaacccggcggccaaaacgctgccggctcgcctgaatcaggtgctgaacttcacccaggcctccacctcgaaaatcgccctgctgctgccgttgaacggccaggcgaaagtgttcgccgacgccatccagcaaggcttcgaagcggcgaaaaacggcggttccatgccggcgccgcagcctcaagccgcgcaaccggccagcacgccggctcaaacggcgcctgccgatcaggccgctacgggtgacatcaacgccaacggcgcggtcagcccttcggcccaagagagccagcctgccgtcaccgccgcgcaacccgctgcgccgtccagcgcgccgataacgccgctgcaggccgccaacgcgcaggtcaaagtgtacgacacaaccagccagccgctggccgccttgctgagccaggcgcagcaggatggcgccaccctggtggtcggcccactgctgaaagagaacgtcgatcagttgtccgccagcaccaccacgctgaacgtgctggcgcttaaccagccggaaacgccgaaggacaacctgaacatctgttacttcgccttgtcgccggaagatgaagcccgcgacgccgcccgccacatctgggaacagcagaagcgtcaaccgctgctgctggtgccgcgcggcgccttcggcgatcgcgtcgccagggcctttaaccaggaatggcagaagcaaggcgggcaaaccgtgctgcgccaggatatcggctccgccggcgagctgcgccaaatggtgaacagcggcggcatccgcatgaccggtacgccgatgtcgagcgccccggcgccgcagagcgtcaccatcgccgggctgaccattcctgcgccgccgagcgacgtgcccgccgccaccggcggcagcgtcgacgcggtgtacatcgtcgccacgcagtctcagctgacgctgatcaaaccgatgatcgacatggccaccagctcgcgcggcaagccggcgatgtacgccagctcgcgcagctaccaggccggcgccggcccggacttccgtctggaaatggaaggcctgcagttcagcgatattccgctgctggccggctcaaaccctcagctgctgcagcaggccagcgcgcgtttccgcaacgactactcgctggtgcgcctgtatgcgatggggatggatgcctggacattggccaaccactttgctgaaatgcgccagctgccgggcttccaggtttccggcaccaccggtacgttgagcgcgtcgccgaactgcgtgatcaaccgtaagctgccttggctgcaataccgtcagggcacggtcgttccagtctcttgaacccacgcgcctcaggggcgggctatgagttactggcccgccgtcacctggaacacgccgggctcaccttctgcgccgccaatgtcgcggtgcgcggcggtgagctcgacctcatcatgcgcgacggcaccacctgggtgttcgtcgaagtgcgctatcgccgcaacgacgccttcggcggcgcggccgccagcgtcacctttcgcaaacaacagcggttgctgcacgccgccgccgtctggctggcagggcgcggagccagttttgacacatcatcttgccgttttgatgttttggccattaccggtagccagttagaatggatacccaacgccttcaatgcggattaatcggggttttgcggcgcagaccggccctttgacttagtggattaatacaacgtgctggatagaattaaagtctgtttcaccgaaagcatccaaacccagatcgcggcggcggaagcactgccggacgccatttcccgcgctgcgatgacgctggttcaatccttactcaacggcaacaaaatcctgtgctgcggcaacggcacctcggcggccaacgcgcagcacttcgccgccagcatgatcaaccgttttgaaaccgagcgccccagcctgccggccatcgctctcaacgccgacaacgtggtgctgacggcaatcagcaacgatcggctgcacgacgaagtgtacgccaagcaggtgcgtgcgctcgggcacaccggcgacgtgctgctggcgatttccacccgcggcaatagccgtgatattgtgaaagcggtcgaggcggccgtgacgcgcgatatgaccatcgtcgcacttaccggctacgacggcggcgagctggccgggctgctcggccagcaggatgtcgaaatccgcatcccgtcgcaccgcagctcgcgcattcaggaaatgcatatgctgaccgtaaactgcctgtgcgacctgatagacaatacgttattcccccaccaggacgattaaggaactgagatgaagctaaaagccacatttgcagtgctgtccagcgccctgctgttgcaaggctgtatcgccggcgtcgtcgtcggcagtgcggccgtcgccaccaaaaccgccaccgacccgcgcagcgtagggacccaggtggatgacggcacgctggaagccagagtcgaaagcgccctgagcaaagaccagcagttgaagaaagatgcccgggtggtcgccaccgcctatcagggcaaggtgctgttgaccggccagtcgcctaacgccgatctcaccgcgcgcgccaagcagatcgccatgggcgtggaaggcacgaccgaagtgtataacgaaatccgtcagggcacgccggtcagcctgagcaccgcatcctccgacacctggatcaccaccaaggtgcgttcgcagctgctcaccagcgatacggtgaaatcgtccaacgtgaaggtcaccaccgaaaacggcgaagtgttcttgctgggcctggtcacgcagcaggaagggcagtcggcggcgcagatcgccagccaggtcagcggcgtgaagcacgtcactaccgcctttacctacgtaaaataatccgcctggcgggagcggcaccgtgccgttcccgcccgtttaatccagcttgttctcgcgtaaaaacgcttccccgcccagttgccgcatctgccgcatgatccactgttgacgctgcaccacatagccggacggcgcatcggccctgaagcgatgcggattcggcaataccgccgccagcagcgccgcttcggccgcgctcaggcgcttggccggcttatggaaaaagcgctgtgaagcctcttccacgccgaacaccccatcgccgaactcgacgatgttcaggtacaccgtcagaatgcgccgcttggtccacaccaattcgatgccggacgtcagcccggcctccaatcctttgcgcagccagctgcggccatcccacaaaaacaggttcttggcggtttgctgcgacagcgtggacgcgccacggatgcgcgtcgggcgcttctcattgtggctgagcgccttttcaatggccgccacgtcgaagccccaatggtctggaaacttctgatcttccgccgccatcaccgccagcgccatttgcggcgagatgtcgtccatcgacacccagtccgaatgggcgacatagccgaagtcgccgctcagccaggcgctgacctgccgttccaccatcacggcggaaaacggtaccggcaggaaggcgaagagcacaatgcccaacgcccacaggccgataatcgcgatgacgccgcgcttcagccaataccacgggcgcagccgccgccatccgacgagcgattttctcattcagccagttccagcacccgcgccaccagcttatcgatgcccagggccgcctgcgcgatagacggcgccagcatataggccggcgtggtcacgatcttatgttcgctgtccaccacgatgtcgtccaccgggcaaatcaccggttcgccgcccatggcgtcaatcacttcccccagatccggatcgttgccaatggtcagccgcgcttgttgatccagcagtttcggcaacagcgccggcgcgatgcacatcaggccaattggtttgttggccttatgcatctcgcgcgtcaggcgcgccaaatcttcatcgacccaacattccgcgccggcttcggcgaaattgctgaggttcttggcggcgccaaagccgccgggcacgatcagcgcatccagctgcgcggcctccgccagcgccagcggctgcaccgcaccgcgggcaatgcgcgccgattcaatcagaacattgcgcgactccgccatctcctcaccagataagtgattaataacatggcgttgtggtttatcaggcgccaagcacaccgcctgggcgccggcacgatccaacgccagcagcgtcagcaccgcttcatggatctccgtaccgtcataaacgccgctgccgctgaggactacacccacctttttcatcactcttactcctgtcgctgctgtcaactggttcgtgctcggagttgacaaacactaatctacatcacacattttaatgaatcttctaacaagagcgcttacatttgctatgttgttggctgtatgatgtttaggaattcgcaacaacctgctcgaccagaacactgaaaccaatacgcaggttcacaatttccctggtgttggcgcaatattcgcgcaccccggcttaggtcggggtcattttttttcagcgttctcaacccaagcccgcagtacctgcacgtcgttgcgccactcttgtttcagctcatccacccaatcctgcacgttatcccaccaggccggcagcgtcggcgtttgaatctgctgcgccagctgctgcagatggcgcagaccgaccgaaccggcggcgcccttgatcttatgcccttcctcagtgatgcctttctgatcgcgcgccgtcatgttggagtccagcaccgccagatagcccggcatcatctgttcgaacatctccagactttggtggatcagctgcgggccaaccagatccatgtactgttccagcatcgcggtatcgagtaacgactcattaatctgcatcgccttgtgctccgttttctttgaagtgtgagaaggttgatgatcccaatagtgtttgatgaccttggtcagcgccggcaccgacagcggtttgctcagcacatcgtccatgcccgcctcgagatactcttttttgtctttcagcacgttggcggtcagggccaccagcggcggcagcgcctgcccggcatagcgctcgcgcagcgcccgggcgatgtccagcccggtcatgtccggcagttggatgtccagcagcaccagatcgaactcgtccggatcgaacatcgccagcgcgtcgtggccgttcatcgccacgtcgacgctgttgcccagcttctccagcaccgagcgcgccacgatcacgttcagttcgatatcttccaccagcaggatgtgcagcgccggcaacggcagcgcctcttcctccggcgccgcgctgacggcttcctgcaccgccggcgccttgatggttaaggtaaagcaagaaccgtgcccttgttcgctgcgcacggtgatgtcgccgcccatgctctgcgccagccgcttggagaccgccagcccgatgccggtgccggtggccgggcggccgccgcgctgatctttcacctggtaatacatggcgaagatcttgtcctgctcgtcctgcgggatgcccatgcccgaatcttccacctcgaacaccagcttctcctgcgcctcgcgccgcacgcgcaccacaatttgcccctgctgggtaaatttcaccgcgttgccgatcagattccacaggatctgccgcaggcgggtgccgtcggtcacgatctgctgcggcagcggcgtctgcggctccatgacgaactgcagccctttcggctgcgccagcaggcccgagaggttctccaaatccgccaggaaaccggtgaagtccaccggctggttgtcgagctgcaccttgcgccgctcgagcttgtccatttcgataatgtcgttgaagatattgccgagggtgatggcgctgacgtggatggtcttcaggtatttcagctgctcgtcgttcagctcggtatcgagcagaatgcggctcaggccgacgatgccgttaagcggcgtacgcagctcgtggctgatagtggagataaaggtggtcttctccctgctggcgttctccagcgcgtcctggtagcgcttacgctcggtaatatcgcggccgaaacccatcagcccgtggcgtttgcccacccggtcgtaaaacggcaccttgcgcagctcgaaacaggccttgcggccatcgggatacaccagccactgttcgtaggtcagcgagacgttgtggcggaacaccttctcgtcggtttcgatcaccttttcggcgatttcctggccgtagacgtcgaacggcgtcaggccgatcaattgcttctcgctcttgccggtcaacagctccatcgcgcggttgcagccggaaaactctttgtcttcgttgcggtagtagaccagatccggcgaggcatcgaggaaggaacgcagcagcgccgattgctggcccagctcaatctgcgcctgctcgcgctgctccatctcttccgtcagcttttccatcacctgcaggcgctcttcttccgctttgatacggtcggcgatctcctgattcagctggctgatattgtctttgagctgctgattgagctccagatcgcggtggcgcatctcttccagcttgtccaccagccgcgccagccgctggcgcgactcttccaactgttccaccaccaccgagagaaaatagaccgcccacggggtgatcaacaggccgaagaagatcgaacgcaccacgtcgatgctttccacttcgccgcgcagcagcatggtcaccgccatctgcaccaccatcgccagcaccaccagcgccgaggccagcagcagcgagaagcgcaccaaccccagtttcaccattaaatcaacgtagtactgggccaacacccggatttgcttcatagcggctcccatcagacacaatcttttgaatcataccgtaaaacagcggtgagataaggcggcaaacgccgaagtgtggcaaagattgcacttcagagcggcatgccagggcggtagcgccacttttcatccagcgcgctgccctgcccgccgtgccgttgcagataagcgccgaccgcctgcatgccgctccagcggttttcgcaccacagcggcgccagcagcgtcggccggcgggcgctggcggaaaggcggtggtacaccacgtcccccggcgtatggcggatcatctccccggcactggcggcgtaatcctccagcgccagttcgggcaaccgcccggcctgccacgcccgcgccagggtgctgccggtgacgacgtgcagcgggtgcagcttgataccgtcgacgccggtctccgtcacccgctgcagcgtgagcagatgatcgcgctgggtttctcccggcagcccgacgatcagatggcagcacaccttcagcccgcgctgccgggccagccgcgcagtctgctgataacagcgaaaatcatggccgcggttgatgcgcttcagtgttttatcgtgcgccgtctgcagccccagctccagccacacctcatagccttgctcgcggtagcccgtcagcagatccagcgcggcggccggcacgcagtccggccgggtgccgacgcacaggccgaccatggcgctctgcgccaacgcctgccgatacatcgcctccagccgttcaacctccgcataggtgctggtataggcctggaaataggccagatagcgccgcgcccgatcgacccgcgcggcctgctgcgccagctgttcggcgatgctctgccgctgcatcgcctcatcggcgaacgaggcgacgttgcagaacgtacagccgccgcgccccaacgtgccgtcgcggttagggcagccgaatccgccgtgcagcgtgagtttatggatcttttcgccatagcggcgctggagatccgcgccaaacatattgactaattgcggcaactgcataatcttggtggttctctgtgttcaaagccgcgatgctaataagaaacggcttttcccgcgatgacagagatcaacgctttccccgcaaggcgccaccaggcataactattcatcataaatgcaaatcaattcactataattctgatgaattattctaatcgtcacgcaaccgttaacggcaatatgacaacacggtgaaaaatagtcataaacatcagcaaagcaatatcttatagaataaaactctggcattacccctcgcactagcatggtgcagagattaaggggttgcactatagtgagacagctcacacttctgagtggatcggcgttgccccatgatagtgcaaaaatgcattaaaacacttatttttcaaataaataaacatcatcaattcgataagaatctatcttaagcccacatttgacctgcgaattctttctcgctaagttggaagtccgctggaagctttctggacgggcaaacgtctcgtcatatttatgcagtaattgaagactccctcttaaaacaagtcctataccacttgtgagaccgtcacgagaggccattgatggagggcggaaaagcagattggcggggttaacttgctgattggacttctgcctgaaattgggaagccccctcgcagtaggttgtgagagtcacgcagagcctggggaggttcacgatatgttgtacgataaatcccaagagagggacaactgtggtttcggcctgatcgcccacatagaaggcgaacctagccacaaggtggtgcgcaccgccattcacgcgctggcccgcatgcagcaccgcggcgcgatcctcgccgacggcaagaccggcgacggctgcggcctgttgctgcaaaaacccgatcgcttcttccgcatggtggcggaagagcgcggctggcgtttggccaaaaactacgccgtcggcatgatgttcctcagccagaatgaagaggaagcgcgcctcagccgccgcatcgtggaagaagagctgcaaaacgaaacgctgtcgatcgtcggctggcgcgaagtgccgaccaacccggacgtgctgggtgaaatcgccctctcctccctgccgcgcatcgagcaaatcttcgttaacgccccggccggctggcgcccgcgcgatatggaacgccgcctgttcgtggcgcgccgccgcatcgagaaacgggtgcaggatgacagtttctacgtctgcagcttctccaacctggtgacgatctataaaggcctgtgcatgcctgcggatctgccgcgcttctatctcgatctggcggacctgcgcctggaatcggccatttgcctgttccaccagcgcttttccaccaacaccgtgccgcgctggccgctggctcagccgttccgctacctggcgcacaacggcgaaatcaacaccatcaccggcaaccgccagtgggcgcgcgcccgtacctataaattccaaacgccactgatcccggatctgcaggccgccgcgccgttcgtcaacgaaaccggctccgactccagctcgctggacaacatgctggagctgctgctggcgggcgggatggatctcatccgcgccatgcgcttgctggtgccgccggcctggcagaacaacccggacatggacggcgatctgcgcgccttcttcgacttcaactcgatgcacatggagccgtgggacggcccggccggcatcgtgatgtccgacggccgctacgccgcctgtaacctcgatcgcaacggcctgcgcccggcgcgctatgtgatcaccaaagacaagctgatcacctgcgcctccgaagtcggcatctgggattaccagccggatgaagtggtggaaaaaggccgcgtcggccccggcgagctgatggtgatcgacacccgcagcggccgcatcctgcactcggcggaaaccgacaacgatctgaaaagccgccatccgtataaagagtggatggagaaaaacgtcaaacgcctggtgccgttcgaagatctgccggacgatcaggtcggcagccgcgagctcgacgacgcgcagctcgaaacctaccagaaacagttcggctacagcagtgaagagctggatcaggtgatccgcgtgctgggcgaaattggccaggaagccaccggctcgatgggcgacgataccccgttcgccgtgctttccagccggccgcgaatcgtttacgactacttccgccagcagttcgcgcaggtcaccaacccgccgatcgatccgctacgcgaagcgcacgtcatgtcgctggccaccagcatcggccgtgaaatgaacgtgttctgcgaagccgaaggccaggcgcaccgcctgagcttcaaatcgccgatcctgctgtactccgatttcaaacagctcaccacgctggaaggcgaatactatcgcgccgagacgctcgatctgaccttcgacccgcaacagcaggatctggagcagaccattcgcgccctgtgcgacgaagcggaacgcaaggtgcgcgaaggcgcggtgctgttggtgctgtccgaccgcgccatcgcgcccggccgcctgccggtaccggccccaatggccgttggcgccgtgcaaacccggctggtggagaaaagcctgcgctgcgacgccaacctgatcgttgaaaccgccagcgcccgcgatccgcaccacttcgccgtgctgctcggcttcggcgcgaccgccatctacccgtatctggcctatgaaaccctggccaagctggtggacagccaggcgatcgacaagaaataccgcgacgtgatgctgaactaccgcaacggcatcaacaaaggcctgtacaagatcatgtccaaaatgggcatctcgaccatcgcctcttaccgctgttccaagctgttcgaagcggtcggcctgcaccgcgatctggcggatctgtgcttccagggcgtggtcagccgcatcggcggcgccagcttcagcgacttccagcaggatctgcagaacctctccaagcgcgcctggctgaaacgcaaaccgctggagcaaggcggcctgctgaagttcgtgcacggcggcgaataccatgcttacaacccggacgtggtgaactcgctgcaaaaagcggtgcacagcggcgagtacagcgactaccaggcctacgccaagctggtgaacgagcggccggtcgccatgctgcgcgatctgctggccatcacgccgaaaggcgaaccgatcccggtcgatcaggttgaaccggcggagtcgctgttcaaacgcttcgacaccgcggcgatgtcgatcggcgcgttgagcccggaagcgcacgagtcgctggcgatcgccatgaacggcctcggcggcttctccaactccggcgaaggcggcgaagatccggcgcgctaccgcaccaacaaggtgtcgcgcatcaaacaggtggcctccggccgcttcggcgtcacgccggcctacctggtgaacgccgacgtgatccagattaaggtggcgcaaggcgccaaaccgggcgaaggcggccagctgccgggcgacaaagtcaccccgtacatcgccagactgcgttactcggtgccgggcgtgacgttgatctccccgccgccgcaccacgacatctactcgatcgaagatctggcgcagctgatcttcgatctgaagcaggtcaacccgaaggcggtgatctcggtgaaactggtgtccgagccgggcgttggcaccatcgccaccggcgtggcgaaagcctatgccgatctgatcaccatcgccggttacgacggcggcaccggcgccagcccgctgtcctcggtgaaatatgccggctgcccatgggaactgggcctggtggaaacccagcaggcgctggtggccaacggcctgcgccacaagatccgcctgcaggtggacggcggcctgaaaaccggcgtggacatcgtcaaagcggcgatcctgggcgcggaaagcttcggcttcggcaccgggccgatggtggcgctgggctgcaaatacctgcgcatctgccacctcaacaactgcgcgaccggcgttgcgactcaggacgacaagctgcgccgcgatcactaccacggcctgccggaacgcgtgacgaattacttccagtttatcgcgcgtgagacccgcgagatcatggcccagctgggcgtgagccagctggtggatctgatcggccgcaccgagttcctgaccgagctggacggcatttccgccaagcagaacaagctggatctgtcgccgttgctgacaaccgccacgccgcatccgggcaaagcggtgtactgtaccgaaagcagcaacccggcgttcgacaagggtctgctgaacaaagagttgctggcgcaggcgcagccgtacatcgaagcgaagcaaggtaaaaccttctacttcgacattcgcaacaccgaccgctccgtgggcgccatgctgtccggcgcgatcgccaacgtacacggcgatcaggggatggcaggcgatccgatcaaggcgcacttctccggcaccgccgggcagagcttcggcgtctggaacgccggcggcgtcgagctgaccctgaccggcgacgccaacgactatgtcggcaaaggcatggccggcggcagcatcgcggtgcgcccgccgatcggttccgccttccgcagccatgaagccagcatcgtcggcaacacctgcctgtacggcgccaccggtggcaagctgttcgccgccggccgcgcgggcgaacgtttcgcggtgcgcaactccggcgccatcaccgtggtggaaggcatcggcgacaacggctgcgaatacatgaccggcggcatcgtctgcgtgctgggtaaaaccggcatcaacttcggcgccggcatgaccggcggcttcgcctacgtgctggacgaagacggcgagttccgcaagcgcgtgaacccggagctggtggaagtgctggatgtcgatcagctggcgatccatgaggagcacctgcgcggcctgatcaccgaacacgtgcaggcgaccggctcttcccgcgcggaagagatcctggccaactggccggagtgggcgccgaagttcgccctggtcaaaccgaagtccagcgatgtcaaagcgctgttgggtcaccgtagccgttccgcagccgagctgcgggtgcaggcgcagtaagaggtaggtcattaatgagccagaacgtttatcaatttatcgacctgcagcgtgttgatccgccaaagaaaccgctgaagatccgcaaaatcgagttcgtcgagatctatgaaccgttttcggaaacccaggccaaggcccaggcggaccgctgtctgtcctgcggcaacccgtactgcgagtggaagtgcccggtgcacaactacatcccgaactggctgaaactggccaatgaaggccgcatcatggaagcggcggacctggcgcatcagaccaacagcctgccggaagtgtgcggccgcgtatgcccgcaggatcgcctgtgcgaaggctcctgcaccctgaacgacgagttcggtgcggtcaccatcggcaatatcgagcgctacatcagcgataaggccatcgaaatgggctggaagccggacatgtcgcacgtgcagccgaccggcaagcgcgtggcgatcgtcggtgccggccccgccgggctggcctgcgccgacgtgctgacccgcaacggtgttaaggcggtcgtatacgatcgtcatcctgagatcggcggcctgctgaccttcggcatcccggctttcaagctggaaaaggaagtgatggtcaaacgccgcggcatcttcagcgagatgggcatcgagttccagttgaacaccgaagtgggtaaagacgtcagcatggagaccttgctgagcgagtacgatgcggtgttcctcggcgtcggcacctatcagtcgatgcgcggcggcctggagaatgaggaggcgcagggcgtgtacgacgcgctgccgttcctgatcgccaacaccaagcaactgatggggtatgaaaccgagcagcacgagccttacgtcagcatggaaggcaaacgggtggtggtgctgggcggcggcgataccgccatggactgcgtgcgtacctcggtgcgtcagggcgcaacgcaggtcatctgcgcctaccgccgcgacgaagccaacatgccgggctccaagcgcgaagtgaagaacgcccgggaagaaggggtggacttccagttcaacctgcagccgctgagcatcgaactgaacagcgccggccgcgtggccggagtgaaaatggtgcgcactcagctgggcgcgcccgatgccaacggccgtcagacggcagagcaggtgccaggttccgaacacgtgatcgacgcggacgcggtggtgatggcgttcggcttccgcccgcaccgcatggactggctggcggcgcacgacgtgcagctggataaacagggccgcatcctggcgccggaaggcagcgacaacgcgttccagaccagcaacccgaaaatcttcgccggtggtgacgctgtgcgcggatctgacctggtagtgacggcgatcgccgaaggccgcaaagcggcagacggcatcatgaactacctggaagtgtaaaccttccgtaccatcagaggcccggcatattgccgggcctctgtttttagtctgccacgctttgtaacaacctccccgctcctcaccgcctcaacgcgctatagtattgagttagcaccattgcggggcgcggctgcgcctgacaccgagataaggatagcgaacatgaaatgctccatttccctgttggccggcgcgctgctggccgtcaatttcagcgcttcagccatggcgctggattcgcaggaggttggttacaatatcgaagcgcgcggcgcacggccggtcgtggcgcagttgggcaaggccgggcagttcggcgccgtggaaaacagcatccggctgggggacgacagctggattgccctggcgcccaagttggccggcggcggcaatgccggctttaccgccggcatcaaatcggccctctccgcagccctgatctacaatccggcggcggtgttgcaggcgctcaacaaaggcaacgatctgccgctcaatgacatttgcaccgcaccgccggaagtgcaaggcgacaccgccatcagcagtttccgtgagcgcgcaacccacgccctgtctaccgtacgcgtaggcgatctcagcgcgccgcgcgacgcctgcattgccgcgttgaaaggctgacccgcgtctgccgggcaaaaaaaaaagcacccccatggggtgctttttcgtttgttctcacggggttatttcaccacgcgcagcgccgggcggccaccgcgcggcggctgcggcggttcgtcatccgggccgttgtcttccgcggtatccgggcgatcgccgtcgatcactgacatcagggtttccgaagggatcgtctcattgtccagaccttcgaacacgccttcgctctcgtcgtaggcggcttccggttcgaacatcgtgccggcgccgttttcacgcgcatagatcgccagcacggcggccatcggcaccgaaacctgacgcggcacgccgccgaagcgcgcgttgaactgcacgtcttcgttacccaacgccaggttgcctaccgcgcgcggcgcgatattcagcacgatctggccgtcacgcgcgaactccatcggcacctgcacgtccgggcgagtcacgtcgaccaccaggtgcggcgtcagttggttatccagcagccagtcgtagaacgcccgcagcagatacgggcgacgcggcgtcatctgagacatgtccatcgcgcttagccccgggtctgcaggcgcatttcacgttcggcttcggtcagggaagccaggaaggcgtcgcgttcgaagacgcgggtcatgtagcctttcagctctttggaaccggcaccgctcaattcgatgcccaactgcggcagacgccacaacaacggcgccaggtagcaatccaccaggctgaactcttcgctcatgaaatacggcgcctgaccgaagataggcgcgatcgccagcaactcttcgcgcagttggcgacgggcggattccgcttcctggccgctgctcttctcgatcttgtccatcagcgagtaccagttcttctcgatgcgcagcatcatcagacggctctcaccacgggcaaccgggtaaaccggcatcagcggcgggtgcgggaagcgctcatccaggtattccatgatgatgcgggattcatacagggtcagttcgcgatcgaccagcgtaggcaccgtctggtaagggttgaggtcaatcagatcttgcggcaggttatccatttcgacctgctcgatctcgacgctgacacctttctccgccagtacgatacgtacttgatggctaaaaatgtcggtcgggccagagaacagcgtcattaccgaacgtttgttggcagcgacagccatgaaaacctccaagttatctagaaaatactgcgaatagccaactgacaggctgctatcctgaataatcttgccgcaggccggcagcacgcagcgcgacccgagcccataaaaaaccggcccaggaggtcaactgcacggcgaacaggcgcaaaagtggatgatagtttaccagattctgcttgttttgtgggggcggtgcggcgaattcatgttgaattgtctgatatgccacagattttagtcggggacggcggatttcaggcgtaaaaaaacccggtgaagcaccgggttttttgcgtaaatcgcactgccgaagcagcgaaaattaacgcttggagaactgcggacgacgacgtgctttacgcagaccgactttcttacgttcaacctgacgagcgtcacgggtgacgaagccagctttacgcagttcagaacgcagagtctcatcgtattccatcagtgcacgggtgataccgtgacggatagcgccagcttgaccggagataccaccacctttaacggtgatgtacaggtccagtttgccaaccatgtcgaccagttccagcggctgacgaactaccatgcgggcagtttcgcgaccgaagtactgttccaggctgcgctggttgataacgatgttaccgttgcccggcttgatgaagacgcgagcggcggagcttttgcggcgaccagtgccgtagtattgattttcagccattgccattaatcccgattaaatgtccagaacttgcggttgctgtgccgcgtgattgtgctcggtgcccgcgtaaactttcagtttacggaacatagcacgacccagcgggccctttggcagcatgcctttaaccgcgatttcaatcacgcgctcaggacggcgggcaatcatctcttcaaaggtcgcttgcttgataccaccgatgtggccggtgtggtggtagtacactttgtctgtacgcttgttgccggttacagcaactttgtcagcgttcagaacgatgatgtaatcaccggtatccacgtgcggggtgtattccgctttatgcttgccgcgcaggcgacgagccagttcagtagcgagacggcctaaagttttaccatctgcatcaacaacgtaccagtcgcgttttacggtttctggtttagctgtaaaagttttcattagaaagcttacccaataattagttacacgttggtgaacacccaaacgctcgaaaacagttgaggttcacacgaccatacaagtccagcaaacctaccccttcgaatagccattgccggcactataaagtttttgggaaaaaaaactttgttgtaacgtggggtcgcaagattatagagaagtcgctcacaaagatcgaacggtttttgaatggaaaataaatttatcgccggcggcggacaaccggcgataggcccggcgggctcagggcagatgcggcagcttgaggtactcttcgctctgcatttcctgcaggcgcgacaggcagcgctggaattcaaatttcagctgcaccccctgatagatctcgaacatcgacgcttcggcgccgatcaccagcttgatgtgacgctcgtaaaattcatccaccagcgccaggaaacggcgcgcggtattctctttcagcggccccatcacctgcacattatacaggatcacgctgtgatacagccgcgacagcgcgatgtagtccagctggctgcgcgcctcttcgcacagcgtgtggaaatccaccgccagcacgccgtccaccgaacggatcgcctgcagcggccgatggttgatctgcagcaccggcgcgtcctcccccgccttgcccgccagcttgacgaacatccgatccagcgcctcacgcgtctggtcgtttagcggtgtcaggtagaggtgcgcctgggtcagggtgcgcagacgatagtcgatgccggcgtcgacgttcattacgtcgcagtactcgttgatcagatcgatggccggcaggaaacgcgcccgctgcagaccgttgcggtacagatcgtccggcgggatgttcgaggtggccaccagcgtgatgccgcgcgcgaatagcgcctgcagcagcgtggccagcagcatggcgtcggtgatgtcggagacgaagaattcgtcgaagcacaatacgtcggtctcggccttaaagccgtcggcgacgatttccagcgggttttcccgcccctgcaactcggtcagctcttcatgcacccgcagcatgaagcggtggaagtgcagacgcattttgcgatcgcccggcaaactgtggaagaacatatccatcaaccaggttttgccgcgcccgacgccgccccacatatacagcccctgcaccgggcgctgcggcgccgtgtcgccgcccttgcccagcaagcggctgagcttgccgcgcagcccgccggcaggcgcgttcgccgccggcttttgccgcagagcctgataaatgcgatccagttgagtgacggcccggcgttgaacctcatcggcctgatattcccccgcatccagcgcctgctggtagcgagataacggtgatagtgcctgcatctgttcgatgttccctaagaacgcttagaaattatttagccaacgttggcggcaagttgatgccgattcgcaccgttatcgccacaaatgcccgctgcgggcgccgctgaaaaccctgtaaaaattaggtggaagcgcatcaggattccactcggacaaggttaacggttatagtggatattattaagtgaaaaatccctgcggaacaacgaagtcaaaataggagtcatcatgacctgggagtatgcgctgattggtttggtcgtcggtatcgtgattggtgcggtggcgatgcgttttggcaaccgtaaattgcgtcaacaacaagtcttgcagaatgagctggacaagagcaaaaccgagctggaagagtaccgtcaggagctggtcggccacttcgcccgcagcgccgagctgctggataacatggcgcgcgattatcgccagctgtatcagcacatggcgaaaagctccaacaacctgctgccggatctgccgatgcaggagaacccgttccgctatcgcctgaccgaagcggaagcggacaacgatcaggcgccggtggaaatgccgcgcgactattcggaaggggcctccggcctgctgcgcggtcaaagcgcacgccgcgactgatattccttcttcgcccgcggggcctcccgcgggtttaatcccgtttgtgccatattgaccttccttcgcattacctttactgaactttgcacgcaaattcacggtcttacccttcactatgacaaggcgattgccttatcatcaaattttcatcggcaggtattgagagagttatcatcaatgaagaaaaagtcgttaattcttagtgcattggcaatgagcctcggtctggcgctcagcgccgcaccggcggccaacgcggccctgcccgtcgccgtgcaggggcagccgctgccaagcctggcgccgatgctggaaaaagtcttgcccgccgtcgtgagcgtgcatgtcgccggcacccaggtgcagcgtcaacagttgccggaagagttcagacgcttcttcggccccaacttccccggccaacagcagagctcccgcccgtttgaagggttgggctccggcgtgatcatcgacgccgccaagggctacgtgctgaccaacaaccacgtcatcaacaacgccgataaaatccgcgtgcagttgaacgacggccgtgagctggacgccaagctggtcgggcgcgatgaacagtccgacatcgccctgctgcagctcagcgataccaaaaacctgaccgccatcaagatggccgattccgaccagctgcgcgtcggcgacttcgccgtggcggtcggcaacccgttcggcctgggccaaaccgccacctccggcatcatctcggcgctgggccgcaccggcctgaatctggaagggctggaaaacttcattcagaccgacgcctccatcaaccgcggcaactccggtggcgcgctggttaacctgaacggcgaactgatcggcatcaataccgccattctggcgccgagcggcggcaacgtcggcatcggcttcgccattccgagcaatatggcgcagaacctgagccagcagctgatcgaattcggcgaagtgaaacgcggcctgcttggcatcaagggcagtgaaatgaccccggacatggccaaagccttcaacaccgacgcgcagcgcggcgccttcgtcagcgaagtgttgccgaaatccgccgccgccaaggccggcatcaaagccggggatattctggtttccgtcgacggcaaaccggtgaacagctttgccgaactgcgcgccaaggtcggcaccaccgcaccgggcaaaaccctcaaggtaggcctgctgcgcgacggtaaaccgcaggaagtctcggtcacgctggacaacagcgagagcgcctcgaccaacgccgaaacgctgtcgccggcgctgcagggggtatccctcagcaacggcgcgctgccgagcggcgacaagggcgtgaaggtggagaacgtggataaaggctcgacggcggcgcaaatcggcctgcaaaaaggcgacgtgatcatcggcgtcaaccgccagcgcgtggacagtatcaccgcgctgcgcaaggtgctggaagccaagccgccagtgatggcgctcaatatcgtgcgcggtaacgaaaccatttatctgctgctgcgttaatttgtgcaaaaaccgggctcggtgacatactgcgcccggttaactcatgctatcctccgaacatcgttcaccacaccacgaaaactccatgtttgctaagctcttgcgttctgtcgttatcggtctcatcgttgccggcctgctgttggccgccctgcccatgctgcgctcttccaacggcctgtttgcagagaaaaccgagaataccagcgacgaaacgccggtgagctacaacaaggcggtgcgccgcgccgcccctgccgtggtgaacatctacaaccgtaacctgaacggcgccgccaacgtgctgtcgctcggttccggcgtgatcatgaacgaacgcggctatatcatcaccaaccgccacgtgatcaaagacgctcagcagatcaccgtggtcttgcaggatggccgccgctatgaagcgctgctggtcggctccgacggcctgaccgacctggcggtgctgaagatcgatcccggcaacctgccggtgatcccgaccaataaaaatcgcgttgcccacgtcggcgacgtggtgctggcgatcggcaacccctataacctggggcaaaccgtgactcagggtatcctcagcgctaccgggcgcatcagtatgagcaccactggccggcagacgttcctgcagaccgacgcctcaatcaaccgcggcaactccggcggcgcgctggtcaactcgctgggtgagctgatcggtatcaacaccctgacctatgacaaaatcaccgacggcgaaacgccggaaggactgggctttgcgatcccgatcgaactggctaccaagatcatggacaagctgatccgcgacggccgcgttatccgcggctatttcggcattcagggcaaggagatcattccgctgcgcccctccaattccggcatcgatcgcctgcagggcatcatcgtgaccgaaattacgccgaacggcccggcgagcaacgccggtttccagatcaacgacatcatcatcaacgtggataacaaaccggcggtatccgtgctggaaaccatggaccaggtggcggagatcaggccgggcaccgagataccggttatcgtgctgcgcgacggcaaacgcattacgttgaaaatgacggtgggtgaattcccggaagacagcaattaaaaaagggccggcattgatagccggccctttgctattcatcctgccgacgcagccgcgccggcgctaatgacttactcgcctttcacgcgctcgatgttcgcacccagcgcgcgcagcttgtcttcaatacgctcatagccgcgatcgatgtgatagatgcgatcgacaacggtcacaccgtcggcgatgcagccggcgatcaccaggctggcggaagcgcgcagatcggtcgccatcacctgagcgccggacagctgttcaacgccatggcagatcacggtgttgctctcgatctccgcgtgtgcgcccatgcggatcagttccggcacgtgcatgaagcggttttcgaagatggtctcggtgatgacgccagtgccttccgccaccaggttcagcaggctgaactgagcctgcatgtcggtcgggaagcccgggtgcggcgcggtgcgcacggtgaccgctttcgggcgcttgccgtgcatgtccaggctgatccagtcttcgcccacttcgatatcggcaccggcttcgcgcagcttggccagcaccgcatccagcgtgtccggacgggtgttgcggcacatcactttgccgccggaaaccgcggcggcgatcaggaaggtgccggtctcgatgcggtcaggcagcacgcggtacacgccgccgcccagacgctcgacgccctcgatggtgatcttgtcgctgcctgcgccgctgatcttcgcgcccagcgtgttgaggaagttggcggtatcgacaatttccggctcacgcgcggcgttttcgataacggtggtgccggtcgccagggtcgcggcgctcatgatggtcacggtcgcgcccacgctcaccttgtccatgacgatgtgcgcgcccttcaggcggccctcgacggacgccttgacgtagccttcttccagcttgatctcggcacccaactgctccaggccggtgatgtgcagatcgaccggacgcgcgccaatcgcgcagccgcccggcagggaaacctgaccgcggccgaaacgcgccaccagcggccccagcgcccaaatggaagcgcgcatggttttcaccagatcgtaaggggcgcaaaactcgttcacgccgctggcgtccacgaagaccgaaccgttgcgctcaatcttggtacccaactggttgagtagtttaatggtggtgtcgatgtccttcagcttagggacattctgcagctcgaccggctcttccgccaacagggcggcgaacaggatcggcagggcggcgtttttggccccggaaatagacacttcaccgctcaggcgggtccgaccctgcacacgaaatttatccatctgactactctctgttatctaatctgaagctgcccgcccggcagggcaaacagccttaaaatccgttgagtttgcggtctcgctgccactcttcaggggtgtacgccttaatagacaaggcatgaatgcggttgtccgcaatgtattccatcagcggtgcgtaaaccgtctgctgttttttgacgcggctcatgccggcgaacagttcaccgaccacgatcgcctgaaaatggctaccgtcgcccgtcacatgtacttcatccagtgccaatgcctgcatcagcacgtctttaatctcgttggtttccatagtatccagttctgccgctaaaggatcataaacagcctagtatcttagtggaatacgatgttttcttaaactaaagaaaaagcccctgcataacaggggctttgtatcgttttaccacgcaagagcggcctaaaacaccgctaaccggcggtatcgacaggcattatcgcctgcaggttgtagagcgcgatcagcgttttcaggcgctcggtagcgccgaaaattttcagcgctacgccgcgttggcgctgctcttcctgcagatgcagcaacagcgccagcccggcggagtccacgcgctgcagttgcgccacgtcgatcgcggttttatccgccatcagcgcggcgcgctgccgccacagcggctgcagcgtttcccggtccagttcaccgcgcaggatcagcgtctgccgctctgattcgaagctgagcgctgccgacatcagtttttcttgtccagcgtgataggctgcgcggcggcggcctgcagctgcttggtcaggccgtcgatgccctgagtacgcagcgtagacgcccactcattttgcttggtggtgatcatgctgacgccttcggcgatcatgtcatacgcctgccagtagccggttttgctgttcttgcgccattggaaatccagacgcaccggcgggcggccgccgttgtcgatgatggtgacgcgaatagccacgatgtcggcattgcccagcggctgttcaggcgcgatctggtaagtctggccgtgatacatcgccagcgcctggccgtaagcctgctccaggtaagcctggaaggcggtgaagtaagcttcgcgctgcgcaggcgttgcctctttgtagtaacgccccagcaccagcgcgccggcgtatttcacctgcacgaacggcatcagttcctgatgcacgatggcacgcaggtagttcgggtcctgcttgatcttcggctgttcgttcttcaaacggctgaaagtcttctgcgccgcttcttgcatcatgctgtagggattggtttggtcggctgcgctcgccagcggtgcaaccaccagcagagccaccatcagtaaacgtttaaacatgcaggtatcctctcttaatgatttggaacagcgggttgcggtgcggcgccggcagccggctcagcggccgcgtctcccgatttggcgctgtcctgaccgccgcttttatacaggaactggccgatcaggtcttccagaaccatggctgatttggtgtcctgaatggtgccgccatctttcaggatggtggtgcccatatcaggatcttcaaagcccacgttaagcgccagatattgctcgcccagcaggccggaggtgcggatcgccagcgaactggtatccgggatttggtcgtactttttctggatatccagcgccacgcgcggcgtgtaggttttcgaatcgagttcgatgtccgccacgcggccgatcaccacgccgccaattttcaccggcgaacgcggtttcaggccgccgatgttgtcgaacgtcgcgtaaatgcggtaggtcggctcgctgccgatcgatttaaggttcgccacctgcaggcagataaacacgatggcgcacagcgcgatcagcataaatgccccaacccagatttcactcttcttcgtttgcatcgaatcaattcccaaacatcagtgcggtcagcacgaaatccaatcccaacaccgccagtgacgaatgcaccacggtacgcgtcgtcgcccggctaatcccttcagaggtaggcacggcgtcgtacccattgaaaatggcaatccaggttacggtaatggcgaataccacgcttttgatcaggcagttgagcagatcttttttccactccacggcgccctgcatcgccgaccagaagaagccgctgtcgatgcccttccaatccacgccgaccaccgaaccgccccaaatgccgatcgccacgaagatgatggtcagcagcggcatgctgataagtccggcccagaagcgcggtgccacgatgcgccgcagcggatcgaccgccatcatttccaggctggagatctgctccgtcgccttcatcaggccgatttccgccgtgagcgcggaaccggcgcggccggcaaacagcagcgccgtgaccaccggccccagctcgcgcagcagcgacagcgccaccatcatgccaaggctggcctcggcgctgtaggtggtgagcacgatatagccctgcaggcccagcaccatgccgataaacagcccggagaccatgatgatcagcagcgactgcacgccgacgctgtaaagctgtttcaacaatagcggccactgcttgccgggttccggccggccaatcaacgcgttgaacagcatcaacccggcgcggccgaagctggcgctggtgttgatgccactgcgccccaacgacgctaacgctcttaataacatgagcttatttactccctaagcctagcagttcggtctgataatccccggccggatagcggaacggcaccggcccatccgctataccatccaggaactggcgcacgcgcgcatcaggattgttctgcaattgctgcgtggtgccttcggcgatcacccggttgtcggccacgatgtaggcgtagtcggcgatgctcagcacctccggcacgtcgtgcgacaccacgatgcaggtaatgcccagcgcatggttcaactcgtcgatcagcttgaccagcacccccatggtgatcggatcctggccaacgaagggttcgtcgaacatgatcatttccgggtccagcgcgatcgctcgcgccaacgccgcccggcgcgccatgccgccggaaagctcattgggcatcagttgggccgcgccgcgcagccccaccgcttccagcttcatcagcaccgtgctgtgcaacaaaggctccggcaggttgctgtgctcgcgcagcgggtaggccacgttttcgaatacggtcaaatcggtaaacagcgcgcccgactggaacagcatgctcatctttttgcgcgcgtcgtataactgacgccgggacaacgcgggaatgttgtcgccgtcgaaccaaatctccccgctgtccggcgccagctggccgccgatcaggcgcagcagcgtggttttgccgatgcctgatggccccatgatcgccgtgaccttaccgcggggcaccgtcaggttgatgtcttcaaatatccgtcggtcgccgcgcgagaagctcatgtcgcgtacttcgaccaaattatctgccttttggagcatgttaatggaccctttacgactcatcttttgctgaatctacccgtgatgttaaagcaatgggcgcaatccgtctcatctttacaaaaacttactgccatttcgcaaccaatggtgccattggttttacttttccgcgccacccggtcaaaattggcgccataacgaaaaaaaacgaaactgttcaactattagccggggaaaaccgttgctgcggctcaaacgcgcgcaacggagggcaagcaataccgccgcattgacggctttaaccaacgaaccgggataatacccgacaaaggaccctgcatgtttctcgcgatagcattattaatcgttggtttatttctactggtgtacggtgcagaccgcttagtttatggtgctgccgtgatttcccgctcgctcggcgtaccgccgctgatcatcggcatgaccatcgtcggcatcggcacctcgctgccggagctgatcgtgtctaccaccgccgcgctgaacgggcagatagatatggccgttggcaacgtattaggttccaacatcaccaacattttattgattctgggcgtggcggcgctgattcacccgctggccgcgcgctctgagatactgcggcgcgaactgccgctgatgttagcggtcacagtattatgcggtttcgtgttgatggacggcaccctgagcaggctggacggcgtgctgctgctggccgccgccgccggcttcatcctactgatgctgaaaatcgcccggctggcgcagcgcgagggcagcgacagcctgaccatggagcagatcgccgagctgccgcaggacagcagcaataccgtggcggtgctgtggctggtgctggcgtttatcattctgccgctctcttccagaatggtggtcgataacgcgacggtgatcgcgcactatttcggtctgagcgaactggtggtcggtttgaccattatcgccatcggcaccagcctgcccgaactggccacctccatcgccggggcgctcaagggcgaggatgatatggcgattggcaatatcatcggctccaatattttcaacacggtgatcgtgctgggcgtacccgccctgctgtcgccgggcagcgttgacaccgccgccttccatcgcgattactgggtgatgctggcggccagcgtgctgctgagcgtgctgtgcatcggccgcaaacatcgcatcggccacctggcgggcgcgctgttattatgcggctttattgcgtatcttgcggtgctgttctttaaccctttcagtactttcggctaaaccgacgggaatgagtatgtcgaacattgagttgcaaccgggcttcgattttcaacaggccggcaaagaagtgcttcagatagagcgtgaagggctggctcagctcgacagctacatcaacgcagacttcacccgcgcctgcgaaaccatcgccgcctgcggcggcaaagtggtggtgatgggcatgggcaaatccggccacatcggctgcaagatcgccgcgaccttcgccagcaccggcacgccctcattcttcgttcatccggcggaggccagccatggcgatttgggcatggtcaccccgcaggacatcgtgctcgccatctccaactccggcgagtccagcgagatcctggcgctgatcccggtgttgaaacgccaacagatcaccctcatctgtatgactaacaatccggaaagctcgatgggtaaagcggcggatatccacctgtgcatcaaggtgccgcaggaagcctgcccgctggggctggcgccgaccaccagcaccaccgccacgctggtgatgggcgatgcgctggccgtcgcgctgctgaaagcgcgcggtttcacgccggaagatttcgcgctgtcgcatccgggcggcgcactcggccgcaaactgctgctgcgggttagcgatatcatgcacagcggcgatgaaattccccacgtcagcgccgacgcctcgttgcgcgacgcgttgctggaaatcacccgcaaaaatctgggcctgacggtgatctgcgacgatctgatgaaaatcgccggcatctttaccgatggcgacctgcgccgggtgttcgacatgggcatcaacctgcacgaggcgaagattgccgatgtcatgacgccgggcggcgtgcgggtgcgccccaacatcctggcggtcgatgcattgaacctgatgcaacaacgccacatcaccgcgctgctggttgccgatggcgaccagttgctgggtgtggtacatatgcatgacatgctgcgcgccggcgtcgtttaattaaggaatagaacggaatgggtatggtagaaacctgctacgggccggtagaacaagaggttatggcgcgtgccgggaacatccgcctgttgatttgcgacgttgacggcgtgctgtcagacggcctgatcttcatgggcaacaacggtgaagaactgaaggcgttcaacgtgcgcgacggctacggcatccgctgcttgaaaacctcagacatcgaggtggcgatcatcaccgggcgctccgccaggctgctggaggaccgcgcgcagacgctcggcatcacccatctgtatcaggggcagtccgataagcttttggccttccgcgaactgttggataaactgtcgttaacggcggatcaggtcgcctatatcggcgatgacctgatcgactggccggtgatggcgcaggtcggcctggcggtcgcggtggcggacgcccatccgctgctgacgccgcgcgcccactacatcacccgcattgccggcggccgcggcgcggtacgcgaactgtgcgacatcattcttttggctcaaaataagctggaggacgccaaagggctgtcgatatgagtaaaaccaaactgtggatcaccatcctgttgacggtgatcgttctggcgctgatcggctggaacatgacggacttcagcgacgacacggcccctggcccggtcaacgatcaggatccgacctaccagagccagcacacggtcaccgtggtgtacaacccggccggtaaactgaattataagctggtggcggaagacgcgaagtattacaccgccggcgagctgagctggttcacccagccggtgatgacgctgttcgatgagaatgcggtggccacctggtcagttcgcgccgatcgcgccaaactgactaaagaccgaatgctgtatctgtatggtcacgtcgaggtgaacagcctgaccaccacctcgcagctggaaaaaattaagacggacaacgctcaggtaaacctggtcacccaggacgtcacctccgatgacgaagtcacgctttacgggaccaattttacctctaacggcatgaaaatgcgtgggaacctgcggaccaaaaccgctgagctgattgataaggttaagaccaactatgaaattcagaaccaaaaaccaactccgtaacctgttgctcggcagcttagttttggccgccagcgcccccgctctggcgctgaaatccgactccagccagccggtcagcatcgactcgctcaagcagtcgttggacatgcaaagcaacgtcagcaccttcaccgacaacgtggtgatcaaacagggcaccatcgatattcgcgccgacaaggtggtagtcacccgcccgggcggagatcagaataagacctatattgaagcgttcggcaacccggtaaccttctaccagatgcaggacagcggcaagccggtcaaaggccacgcgcagaaagtgcgttacgacgtggcgacccagctggtgaccctgacgggcaacgcctatctggagcagctcgacagcaacgtgaaaggcgatcgcatcacctatctggtgcaacagcagcaaatgcaggcgtttagcgataaaggcaaacgcgtgacaacggttctggtaccgtcgcagttgcaagacaaaaacgagcaaaaaaagagtaactaatcacttatggcaacactcatcgcagaaaacctggcgaaagcctacaagggccgtaaagttgtcgaagacgtcagcctgaaagtgaaatccggcgagatcgtcggcctgctcggcccgaacggcgccggtaaaaccaccaccttctacatggtggtcggcatcgtgccgcgcgacgccgggcgcatcgtgatcgacgaagaagacatcagcctgctgccgctgcacgcccgcgcgcgccgcggtattggttacctgccgcaggaagcgtcgatcttccgccgcctgagcgtgtacgacaacctgatggcggtgctggagatccgtcccgacctcaccagcgaacagcgcgaagaccgtgccaaggagctgatggaagagttccatatctcccatctgcgcgacagccttggccaggcgttgtccggcggtgaacgccgccgcgtcgaaatcgcccgcgcgctggcggccaacccgaaattcattctgctggacgaacccttcgccggggtggatccgatttccgttatcgacatcaaaaaaatcatcgagcacctgcgtgacagcggcctgggcgtgctgatcaccgaccacaacgtgcgcgagacgctggacgtatgtgaacgcgcctacatcgtcagccagggcaaactgattgcccacggcacgccggatgctattctggccgacgagcaggttaaacgcgtttatctgggcgaagagttccgcctctaagcgccggcgcgccctgcggggcgacaccgttaacggaagtagacagaaaactatgaagcaaggtttgcaactcaggctcagtcaacagctggccatgactcctcagctccagcaggcgatccgcctgctgcagttgtccacgcttgagcttcagcaagagatccagctggcgctggagagcaatccgctgcttgaacagaccgatctgcacgacgaaatcgacgccaaagaaacccaggagaccgaggggctcgatacccgcgaggcgctggaacagaaagacatgccggaagagctgccgctggacgccacctgggatgagatctacaccgccggcacgccgtccggcaccggcaccgactacagcgacgacgagctgccggtctatcagggcgagaccacccaaacgctgcaggattacctgatgtggcaggtggatctgacgccgttttccgataccgacgccgccatcgccacctccatcgtcgacgcggtggacgacaccggctatctcaccgtgccgctggaagacattctggaaagcctgggcgacgaaaacgtgaccctcgaggaagtcgaggcggtgttgaagcgcgtgcagcgtttcgatccgatcggcgtcgccgcgcgcgatctgcgcgattgcctgctggtgcagctctcccaatacgccaaagacaccccttacctggccgaagcgcggctgatcatcagcgagcatctggatctgctggccaaccacgactttcgcagcctgatgcgatcaacccggctaaaagaagatacactgaaagaagcgatgctgctgattcagtcgctcgatccgcgcccggggcagtcgatcaataccggcgaatcggaatacgtgattccggacgtgctggtgcgcaagacgcagaacaaatggacggtcgagctcaacggcgacagcgtgccgcgtttgaagatcaatcagcaatacgccgcgctgggcaacagcgcccgcagcgaagccgacggccagttcatccgcagcaacctgcaggaagccaagtggctgattaaaagcctggagagccgcaatgagacgctgctgaaggtcacccgctgcatcgtcgatcaacagcaggcgttcttcgagcaaggcgaagagtttatgaaacccatggtgctggcggatatcgcccaggccgtggagatgcatgaatcgacgatctcgcgcgtcaccacgcagaagtttctgcacagcccgcgcggcattttcgaattgaaatatttcttctccagccacgtgaataccgacagcggcggcgaagcctcctcgacggcgatccgcgcgttggtgaagaaattgattgcggcggaaaaccccgccaaaccactcagcgacagcaagctggccaccctgctcgccgatcaggggatcatcgtggcgaggcgcaccgtcgccaagtaccgagagtctttgtccatcccgccgtcgaaccagcgtaaacagttggtttgacctctattgagaaggaagacactatgcagctcaacattaccggacaccacatcgaaatcaccgatccgttgcgcgagttcgtgaacaacaagttcgccaaactcgaacagtattttgatcgcatcaatcaggtgtatgttgtattaagtgtggaaaaagtgcagcaaattgcggaagcaacggtgcacgtgaatggaggcgagttgcacgccacctcggaagacgagaatatgtatgccgcaattgatacgctgatcgacaaattggcacgtcaattgaacaaacataaagacaaattgaagcaacactgacaccctaacccattccatgaggcggcatccgtcgccgcctcacccttcggcgcgtgacccgcatgggtgacgcgccgaacggtaatcagggttaaaaccgacgaaaaaccgccttgccgggttcgcccggcggcgcggttttaagtgaagatgagatgaacaacgaatatatgcaattaagctcggtgttaaacatcgagtgcaccaaaagctcggtacactgcaccagcaagaagcgggctttggaaattatcagcgaactggccgccaaacagctcaatctgccttcgcaggtggtgtttgacgcggttctcacccgggagcgcatgggcagcaccggtatcggcaacggtatcgccattccccacggcaaactggaagaggacacactgcgggccgttggcgtgtttatccgtctcgaccaacccatcgctttcgacgctatcgacaaccagccggtcgacctgctgttcgcgctgctggtgcctgccgatcagtgcaaaacccatttgcatacgctgtcgctggtcgccaaacgcctggccgacaaaaccgtatgccgccgcctgcgcgccgcgcagagcgacgaagaactttaccaaatcatcaccgagtgatgcccggccggcgtgacttccagcccggataacgatactgttttatgatgatggatccggccacggccggaataacaaagtttaacggtggcgatgaacgccgccgcgatgccaggggagttgccacatggtgctgatgattgtcagcggccgttccggttccggaaaatccgtcgccttgcgggcgctggaagacatgggtttttactgcgttgacaacctgccggtagtgctgctgccgcagctcgccaatacgctggcggaacgcaatatctccgcagcagtcagcatcgacgtgcgcaacatgcctgaatcaccggaagtgttcgaatacgcgatgactcagctgccggacagcttctcgccgcagttgctgttcctcgacgccgatcgcaacacgctgatccgccgttacagcgacacccgccgcctgcacccgctctccagcaaaaacctgtcgctggaaagcgccatcgacgaagagagcgatctgctcgaaccgctgcgctcgcgggcggacctgattatcgacacctcggaaatgtcggtgcacgaactggccgaaatgctgcgcacccgcctgctgggcaagcgcgagcgcgaactgaccatggtgttcgaatccttcggcttcaaacacggtatcccgatcgacgccgactacgtgttcgacgtgcgcttcctgccgaacccgcactgggatccgaagctgcggccgatgaccggcctggacaaaccggtggcgtcgttcctcgatcgccataccgaagtgcacaacttcatctaccagacccgcagctatctggaacagtggctgccgatgctggaaaccaacaaccgcagctacctgacggtcgccatcggctgtaccggcggcaagcaccgttcggtgtacgtggcggaacagctggccgattacttccgctcgcgcggcaagaacgtgcagtcgcgccaccgcacgctggaaaagcgcaaacaatgacggtcaaacagacggttgaaatcaaaaacaagctgggcatgcacgcgcgcccggcgatgaaactgttcgaactggtgcaaagcttcgacgccgaggtgatgctgcgcaacgaaagcggcaccgaggccgaagccagcagcgtcatcgcgctgctgatgctggactccgcccagggccggcatatcgaagtcgaagcgaccggccctgacgaagtcaacgcgctggcggcggtggtcgagctgttcaactccgggtttgatgaagattagtcgctgagactctccccatgcgtcgcctcggcgcatgtgttgcctccccccctcccataacgtagccctcccgtttctcactttgcgaatccgcttccagaatcagccgtaaccgcctgtaaattcacgtcatggatttacccccaccacgataatcgcaatagtgtgtaacgcaaaaacagacaacaggcgggtgtttccccacgctttgcttacgggacaacgaaaagtttacaatttgtgaacttcaccggcagtcgctataatgttcaccgggtaggaatcgaaggaacgatgcatatcatttccagggaaccgttcaataacgcaacgaagcaatatcccaatgaagccactgctctcgaggccatttataaagcattgcgacggggcgagttccgcacgccggacgagttaaaagcgctttttccttcgctcgatcgtatgaaatacaaagagaaatggtgggtcattgacgtcggcggcaaccacctgcggatcttgttctttgccagcttcgagacacagaaagtcttcataaagcatatcgttagccacgccgaatacgacaagctgatgcagcactatcgaaggagttcatcatgattacagatgccattaaggcggccgatgcgctactgcgcgccgtgcccttgttgcagggcagccgcgctcagcaagactaccgggaagcgcttgaattggtggaatacctgctggaaaacgacgaacaccatccgctgattgacatgctggcaaaaaagatcgccgaatatgaagacaacagcgccgaatttaccgcattcaaccagcgtatcgcccagttaccacagggggtagccgcgcttcgcgtccttatggaacagcaccaactcagccaaagtgattttgaacatgagatcggtaaaaagtcgttggttaaccaaatcctgaacggtaaaagatcgctgaccattccgcacattatggcgctggccaagcgtttcaatctgcccccggccctgttcctgccggaagcggattagccctcaactccggctcaggcagtccagcgccaccgctttgaagctgtcgaaactgtcgctgcccagcaggcggctcattgaacgttcacgcacgaaggtgacgaacagctcgtagatcgccatcgcctcttcataatcgctcttgctgatcgccagcaggaaaatcacgtgcgcaacctcaccttccccccaggcgacgccctgcggcgccagcagcgtcaccaccacggtcttcttcgccagcagccccagcgaatgcggcagcgcgataccttcgcccagcagcgtggagacgatcgcctcgcgttcgaccaccgacggataaaagtccgcgccgacgtacccttctcgctccagctggccgcacacccggctgaacagctccgcctgcgtcagcggctcgttgagcaccataaaatgttcggcgtcgaagaacttctccagcatgtacggccgggtgcgatccaccagcaccagcttgcccagttgctccagctgataatcggtcggaaacggcgacatcaccaccaccggcttgttcttctcgccgatgcgggcgttggaaatcacgaagtcttcgtcgatgtgcgcgagcatctcgtaatcgcgcagcgagacgatgcgcgtcatcaccagctgcgggtacttgcgcgcaatctgcgcctggatcatgcgcaccgtcgagttgccggtgtcgcacaccagcatcacctgcgggtggcgttcataaccgatgttgtaatgccgctccagccccacgccgatgtgcaacaccagatagccgatctcgttctcgctcagggtatagggggtgtacttgccccagctggagaccgccgccagcgtcacgtcgtaagccatcggatagtgctgcttgatgttggccagcagcggattggggatattgatctggtatttcacccgcgtaatcatggtcttgatatgggtgagcagatcggcccgcagctgctcgtcgccctgcaggttgtagttatagtgtgcgttgatgtaggacaggatgtagtccaccagcgcctcttcatcgtcggcgttgatctcggtcggctgcacgtcctgcacgcgccgcgcggcgatgttgacccgcagataggcctcttcggccatcgagatctctttgccggaggccgcgcgcagctccgccgccagacgggtcgacacctgacgcaccgcctcgtcgccgtcctccacctcgaagtccggcagcggataaccgtcgttgatgcgccgcagcgccaccgcgcagtagaagatcaggtactgctcgccctcgtcggtcaggcgaatggcgtattgcgacaacagcgggtgcaacaatccggcgaacgccgccacctgaggctgcaacaggatctcgttgttgagcaacgggttctcggcgtcggccaactgcagctggaacagcagatcggtcaggcaggcgcggatcgccatctccgcgccgaacagcttcatgccgtagcgcggcttggtttcgatcgtcaattgatagtgcgccagacgctctctcacctcagccatgtcgttttgcagcgtgccgcggctgacgaaccactcgtcggccagatcttccagtttgagagagaaggctgaggtcaaaaaacgcaccagcagataatgcacccgctcctgcgcgctgcgcggggtggcctgtttgcggcgctcctgatgctgcagggcgctgaatagcgcggcgttatcgacctgcaaacgatagccggccccgcggctatgcacgaagcgcgcaccgtatttgtccaggatctcgttcagcgcggtgatatccgcccgcaccgtgcgggtggacacggcgaaacgcttcgccagctcatcctgcggcaaagtctcggtttgcaaagcatcgaacaagtaagccaaacgcgggtaaggaaatcgcaccattctgtgtccgtcaatcaggcggcccacccggcgaaccgggcgaaccgggcgggccacgggttacttcgccggcggcaggaacgccatttgcgaggggctgccgatcggcagatagccgcccacaaagctgagtttgccgtccgtcgggttgacgctgaagcgagtgacgttatcgctgcgctggttcagcgcatacagatagcggccatccgggctcagcgccagcgaacgcggataatcgccgcgggtccaggtttccgccaccggtgtcaactcgccgccggcgcccacgctgaactgggcaatgctgttatgcagccggttggcgacgtacagcgtgtcgccgttcttgctgagcgccagccccgaagcgaagctggtgccctgatagtcggcgggcagcgcggaaaccgcatgcagttgtttcagagtacctttttggcgatcaaaacggtagctggtcaacgtcgaggcctcttcgttcaccagcagcacggtgtcgccgtccgggtggaacacaaagtggcgcgggccggcgccggcggaagaggcggcgatccacggcggatcgttcggcgtcagccggccgctcgcggcgtcaaagcgccattggtagatgcgatccaaccccagatcggtggagaacacgaacttgccgctcggatcgctggcgatcatatgggcatgcgggccgttgtgatcgctgatggcgaagctgccgttcaccgccgccgccggtttggccgcgcccgccgggccctgctgttgctgcaccgagctggcggcgcccaggctgccgtccgcttcaatcggaaaagccgccacgctgccgctgacatagttcgccaccagcagatggcggccgtccggcgtcaaggagagatacaccggccctgccccctgcgaatctacctggttgagctgcgtcagtgcgccatcggccggattgacccggtaagcggtgatgccgccgtgtttgccgccgttgaagtcggccacttcactggcgacatacagcgtcttgccgtcagcacccaacgtcaactgcgccggattcggcacgttgctgaccaacgtagcgtggctcaacgcgccgctggccggatcgacctgcacccggtaaacgccttcgccgttgggattgtaggtgccgatataggcgaaatgagatgacgtggagttcattgcatcctcagcatgcagcgccgggccggtcacggccagcagcgccaagaacaacgcggtgcgtcgggttggaacctgccagtttcgcatagtaatcctcagtatatatccgtcatctttcaagccgcagcgttgttggctgcccgcactcaccccagtcacttacttaagtaagctcctggggctcctgcgcttgccgcctagctgcaacttgaaagctataggctatagctaacggcgacgcggcatgccgcgccacgggaaaaccttcgcctcccagcgtttacctcatcccattacgcgttcaacccaccagctttttggtcatcgccagcagggttttcacgtcctgcggacgcgtgtcgccgctggcggcgtcgatgatcgaactgtagatatgcgggatcacgcgtttcacgccggccgccagggcgatctcaacgatcggctcgtagttttccagatcgatgccgccggtcggctccagcatgaagtcatgctcggcgcaggccttggcgacgtattggtattcgtccttgcacttcaggccgcccatcgggaaatacttgatggaactgccgcccatgtccttcagcaaagcgatggcggtttccaccggcacgatgccgtccggcgccgcggcgctcaatgggccggtagagatcttcacccagccgacgcggccggtcggcgacaccaggccgttgaccacgctgtcgttctggcccagcagcgcgcggctggcgccgacgccggtaaacacctggttaacgtgctgcggctgcacctgctgagcgatcaggctgaccatcgccgactgcttcggatcgccggcgcccaggccgaccgacagcgcgttgtcgatcaggcgcgcatagcgcagcatgtcggtcaccgcgctgtcgacgtccgggtagttcttggagagcacgcccaccagcacatggccttccgccgcggcgtagatgtcctgcgcgttggctttggagccggccagcacgttcaggcagacgcggtcgcgatagtagttaggctgcagcttcatgcttgtttctccgtaaacaggttcttgatacagctaaagacggtcatcagctgttgctcgtcgacgctgcgcacgtcgacctcaatcttgccctcgttggccttgtagccgcggaagtagatggcaatatcgccggttttcagcgcctgaacgatgtcataggtcgaccgccccagcaccgcctcatcaaaggtgatctcggcgcgggcgatatcgcggccggcgctgtcccagacggttttggcgctgacgccggtcagggtgttgaggctgttgaggaacggcgtcatccgcgccaccatctgttgcccggtggttttctcaagcgtcagatagctttcaattgcctgcgtcaggccgaggatgccctctttgccgaccttcatcgcccggccgatgccgccggactgcagcttcacccacccgacgtactgtttcttgccgataaccaggccgctggtcggcccctcgatggctttggcgccgctgtagatcaccagatcggcccccatctggtagtaacacatcagatcttcttccgccgcggcgtcgacgatcagcggcaggttatgtttgcgcgccaccaccgccgcctgttcgacggacagaatgcttttctgtacgcagtggtgcgatttgacgtacaggatcgccgccgtctgcggcgtgatgcaggcttcaatctgctccggcgaacattcgttggcgtagcccgcctccaccaccttgccgccgcccagcgccaccatggtgtccaccggcgcgccgaagttgacgttgtgaccgcgcggcagcacgatctcgcgcggcacggcgatcggcgccgaatgcaggttcaccagcagattggcgttatctttaacgatcaccgccgccaccgactgggcgatgcccgccgaggcgcaggagacgatcaccgcgtcctccacgttgagcagatcggcgatataggcgccggtcttgttgaccagatccttgatttcgaaatagtggttcaggccgtaatcaacggcgtcgatcacgtcctggcgcggcgtggaaacgccgagaatggtcatgcggccggaggtgttgatcacctgcttcaaaccgtatttttcataaatcgaagacatggcttgcctccccttgttcggttaataggatttccccggccaccaccgcagccagcggcaccaacagccgttcgccctcggcggtttgcccttcggcgtcggcgaacacctgcggttcgcggcgcagttcaaacagcgtgaaatcggcgtcatagcccggctccagccgccctttgccgctgagctgcagcgccgacgcggcgttctccgtcacgcaggcgatcacctgcggcagcgtcaggccgacgctgaagaatttggacatcaccgtcgccaggctatgcaccggcccgttcatgcggttgcggcagtaaatatcggagctgatggtgtacggcaaaatgcccagtttgatcgcctggcgcgccacctcgaagctgaagctggcggtgccgtgccccacgtcgagcaacacgccgcgccgcagcgcgcgctggatagactcgcgcaatgtgcccgccggcgtcagaatgcggttcggtttgccgttgtagcagtgggtgatgatgtcgccgcgggtcagcagatcggcgatgtcgtccagatccggcgggttgttgccgatatgcaccatcagcggcagctggcggttttcctgctggatctctttggccaacaccagcggccgggtaccgtttttccccaccacgctgctgctcatgcgcgccttgatgccgatgatgaaaccggggtgattggcgatggcctggccggcctcgcgcttgtcgatgtccgtcaactccgccagctcgttctgccgcagcaggccgatgcgcgagatgttgaggaaggcgaaaacgttggttttggcgctgcgcgtcagctgataaaaggcgtcgatatcgtcagcgccggtgctgccagcgtcgaccacgctggtgacgccgctggcgacgccgacccgatccggctcgtcatggtaaatcggcgattcaggatagcagtgcacgtgcgcgtcgatccaaccggcgctcaggcggcagttgcccgccagatccagctggcgaacggcgctgacgtccgccgccagccgccccaccgaggctatttttccgtcctttaccgccagatcgatcagcgtatcgtccgccagtctggcgcctctgattactaagtcatacataccgcattgctcctgttagcccgggcgccgccgcagcctcgggcggcgcctggcgcaggcctcttaagaaatggctaccgggaagatcgcccccaggatcatcgcgccgaggatcgctccgccggtgatcggtttgccccagatatagaacagcagcgcgccgagcagcgaaccgatgccgatcgggatcgaagcggtcatcgccgacaggatgatcaacggcccgaggaaacggcccgacgagttgcccgcgcccatcatcacgtccgcgccgtaggtggagttgctctgattgatggtgaatttgcgcgccaggatgatcacgtaaccgatcgccaggccgatgatcagaccggtggccagcgacgcggcgaagttggcgaccgggaacacgatgccggcccccagcagcagcgccggtacgcccagcccgacgccggtctggatcgcgccgccgatgtcgaggatgcccaccagcgagccttcgatgatgcgcgcgaacaggaagctggcgccgaacgccgccaccgcgccgtacacgccggtatccatccccgcccgcagcatggagacgaaggccacttcgttaaaggcgccgatgccgtacaggtagtacatgtgcgtcccggcgaacacgccggaggacagcaggccaacaaaaatcgggaatgaccagtcggcgtaccagaagcctttttgggtttgctcttccatcatcccgctccttatttaccgctcagggtgttgtgaatggcgtccagccagcccggcacgccgaggctgaaggactcgagaactttcatgtcgaagccgcggaagaagccgctcagcacgaacagcagcacgattaccgccatcatgatcttggtgattttgttccagccgctctcttcgacgcctttgccgatcagaatgcccagcaccaggcccggtacggcgttgcccatgatcagctgcgccaggccgccgaagatggtgccccagaagccggaacggcgcccggcgtcgatcgccgccagccagaagatcaccggcatcacggtgttcaccagcaggttggccgccggcaccagcaccttgatcgcggtgacctgcagcgcggcaggcacggcggaagcggtggtattgagaaacgccaccaccagcatgccgatgatgccgcaggcgatagccatttttttcggatcgtgcagcgtttgcgccagattgcggtttttgaccatcagggccgccgcgccccagtgcgggatgatgcggtgatcgacgtcctgcgtgaaggagcccgccgccacggaagacgcccaggcgttgaagaagaagcccagaccgaaggagaagtgggaagccggatcgccctcgcaggagttcagctcgcccagggtgcgaaacgctcccatgccctgtgttgtcggcgcgtggaacatgcgtgcggcgccggcccctacgccgacccccaccagcccaccgataataatcgatttaaataagatgattaaaaacatcagtataccctttcatttatgctaacgtttttatttcgtgacgaagacaaccttctcggtattgataatggttacgttcacggttatttccagagaaacggcatagctctttctttcacgcggcaaaaagaagaaaagaaatttctctttagttattttctcttccgccttcactacgctgacgtcctgcggctcgatgcgcagcagaatattgttggtggactttaataccgcgccctgcacattagccaaggcggaagcaaaagctttcgctttgctgtcgcctttaccctccacctttaccgatgtggtatattgctctttcattatgggttgccatgttttttgacgtaggcttccaccagtttctggcccagctcttctttatccataaagccgaaacccagcacgttgcagccttcgttaattgccgtcacgccctcttccaccgaacgcatgccgtatttggctttgtagccgtatttggtttgcgcggtaatcgcaccggcgccgccgctgccgcaaaaagagatgcccagctgcgcgttttccgctttcatgacgtcgcccagcttcatatccgccgccacgccggggatgaccaccgcttttccgcctgcgttttcaacgccctggccgactttttgccctttgcccaaacgatcgccgatcactacggtaatttgacccatggtatattctcctgattgaaatcgatgcgttaaccgctatgcgttattatctttcgccacttcgaagtgcacggacagcaaataggcctcttcgataggcaatgtgccaaactgatccaccacgcgctccgccatttgcatggactcggcggaaatttcgtcgaacaatgatttatccacctccggcaacggctcgccggttattgagcgcagcaccatggcgcgaatatgcgattccagcatctgttgctgcaccgcattggtataaatattctcagcattcagcatcgcggtaatatccgccagcacccgagcggtgatctcaccggcttcgctgatatcggattgttcaatttcttttaatgaagcagatccatcattcacttttcagtacccctagatcccacattaatcagtaagccgtaaagcgcatcacctgaataacccgctttctgtgatgtctttaccctacccccggcaagattttctgtggagaccggttttttccagttcgaagtggaaatcgaatgacgcgcggagatccatttcgcaaaacggcgctgcggcgaaaaagtgaatgagataacaaatacataacccggctaacggttttttttgtctcgattgacgataaaagccttcgtgatcgggatctctttcttttctcgccccaaccgcctactatcaatgggacaaatcgacattacccacacccccgctcctctggcgcgggggtgttgctttgtgttgtttttccgaatttatgggcgcacagactggcgccctttgatttgactggagagtggaatgaccaaacccatcattactattaatgagctggatgcggaacgcctggatgcgctattggaacaaccggcctttgccaacaccgacgtcgccgccgcgctgaacgacgagttggatcgcgcggaaatcctgccgccggagaaaatgccggccaacgtggtgaccatgaacagccgcgtgcgttttcgcgatctgcacaccgatgaagagcatgtgcgcacgctggtctacccagcttcgctgaaagacagccacgatcagctgtcggtgatggcgccgctgggcgcagcgctgctcggcatgcacgtcggcaagcagatctcctggcaattgccgaacggtgaagaagcgcggattgaagtgctggaattgctgtaccagccggaagcggcgggcgaataccaccgttaagcggttttcagggcggcatccggccgccctttctgtctcagaggcagatagcgatcagcacggcgatcagcagcagcacgtagattttggcatgcagcgcatcgctcaccttcggcaaacagcgcctggcaaacacgatccccgcaatccccgccgccaccagcagccccagaatgttcagattgacgtaacccagatactgcggcccgctcatctcgcgccaccccaacacgatatacatcagcgccccgatcaccgccaccgggatcgacagcgggttggcggcgctgacgcaatatttcatgtcgtaaccatggcgacgcagcagcggcacggtcatcacgctgccgcccacccccagcagcgtggcgatgccgccgatcaacggcccgccgccccacaacgtggcgggagacagttcggcgcgcgccggtttgatcaggaagccccggcggaacagacagtcggcgatggtcaccgtcatatagaccacaaacagccagcggatcacgccgtccgccagcagcgaggaggcgaacgcgcccagcgccgcgccgatgccgatgaaaaagatcagcggtacgatggtttctcgcagcaggttgccgctgcgccagttggtcagggtggcataactcgcgttgaggatcatcaccgctgtcgaggtcgctacagcaatatgcatcgcctggccgggctgctcgcccgaggcggagatcaggtgatagacaaaaggcaccaccacaaagccgccgccgaagccgaacagaatggtggtgatgccggtcagaaaaccggcacccagtacaatcaacgtttcaatcatggccgtgcgcccgcacgaagtcgtcgaacccggcgcagaactgccccgccagcggatggaaacgatcgccgacgaacagccccagatactgatcgcgcacggcgtcgtgatccaccagctcaatgcccgcctgttccgcccgcgccagcgtctgtgcgtccgggaagccccaatagcgcgaatcaccctgcttttccgccgctatcgcttcgcgccgttccgcccgcatgagctggcgcgccaggaaggtgccgctttgcacgcccagcaacatcatgttttccaggaacgacagatcgtgacgcagctcggcgggcagacgggcgagcaccgggccggcgtcccagtgctcatccatttcatgcagcgtcaccgcacagcccttgtcaccgttcatcattgcgcggaatagcgtcatcaccccgcgatagcgcggcaagtcgccggggtgcaggttccacagcagcttgccgcgtcggctgaaggcgcgcacatagtcggcggagaatttctgatagcagcgcagggagatcaccgcgtccatatgctccaggctgctgataaacgtggcgtcattgatgtcgagaacgcgatgcgctttgaccccggcggcggccaggaacagggccggcggttgataggcaccctcacaggcggcggcgttgcggccaacgaacgggaatacaaaatcgttcagcacctcgcgctcgtacagccccaggcggcgaaccgccggctcctgggtgcggccgccgcttttcgccaaggggaaatacaccgtaaaagcacactcgcctttcagggcggcgatcagatcctgacacaccagccaggagaaaatgtcgttgccgacaaagagcgctacgtttttcatacttcagccttctttgcgttgaaaatagggttgttgaacacgattttgctgatatcccgcgtgatggattccatcgccgaggtataaaaaagatcgcccttggcgggcgcgccgagcgagtagagatgctgctcacggccgcgtcggtcggcgattttcagcgtatgcgggttgcacttcacgccaccgaacaggttctcttgcaccagcccgtcttgcagcagctgctggctcaggcggttgggcggcagttgataggaaggcgtggtgcagttgaacagatactgcgcgcgcacccgcgtctcatggcaacgaaggataaacccgtccgttgccttgctgatatccaccaggccgccgcaggcgcgcaggcgttggctctccagcgccgccacgatcttgttggcattcttgatcggcatggcgtgccgattgcgcatccaggaggagttgtaaaagcgcatgaagacctgccggttgttggcatccatcttgacccaggcggcgcacaccgccgggtggatcgccgccagatagctgcagatatgctccctggcaaagcgcgcgcgatcgaggctgtccgccagatcgcggtagcaatcgcgcctttcccccagcgccgagagcaccgtcagccgctccggccccggatagtggcgcgccagcgcggcgttgatcgcatgcaccagctgatgcgcgtcaataaaatcgcggccggcgacaaagcgccgcagcgcctcaacaaacgcgtccggcggcggacgcatcagcgccggctgcacgctggggaacaggcccgagcgcgacagggcgcagatgtcggtcgctcccagccgctccatcagttcaacgatggcgtcaatcgccgtcaggctgcaaccgatcacgccgatgctcgaataagggttgatcggcggcagatcctgatgagcctgataagcgatcaccccatccactgggtaaaggcattccggcgggttgtgccccgaacacagcaccagcgcgttcatctgctcggcgccgccgcaggcggtggtcagccgatagccggcttcgtgcggcgcgatggcattcacttcggcggtcacgaaattcagcgctacgttactgtccgccgccatatatatcgtcatgtcgcgaataaaatcgagatattcccgatacagccagcgcggcggataacgatcctggcaaaactgcggaaaatgcatggcgatccaatcaacgaagtgcgcttcgtcgaaaatatccgccgacatattttccggcgtcatatttaatatatggctgtcaaaatcgctgctgtatgccataccgcctttaaatccctgcttgtcgaaaaccgtcagggaaagcggccttttgcaatgattaaccgacttattttttataaagttataggcaaaagagatgccggcggccccgccgccaatcacaccgaacttatacatgaaatatcaccttatagtcattgaactgcgctaagaactattgcttcaggtgttggaataaaatgacgctttattccttattaacttcttgtattgcgagaacgagaaccttcgtcccaccctggtgtgaggacttgtacgggcttcatggccgataaaataacggcgccccgaacaagcgttatttttctgccccgatagtagggcgaccgtcgctggcttgctttatatgaaaggccaactatcattgcgtttcggccaatttgcccgccaaagggaacacatgcgcaacgtccgcattgatgacatcgaccacgtaacccgcgcggtgatcgccatcggcaccgattatccgccggggcacctgctgccaatgcacagccaccggcgcgcgcagttgctgtacggcgctaccggcgtcatgcacgttttcacgcagcaaggtaattgggtcgttccgccgcagcacgcggtgtggctgccgccgcagatgccgcacgcggtgcggatggtcggcgtcaccacccgcagcctgtacctcgaacccggcgcgttacccgccgaacgcccgcaggtatgtcaggtggtcagcgtcacgccgctgatgcgccagctgttgatggcggcggtggatatgccgctggagtatgaacaacagggccgcgacggcgcgctggcggcgctgctgctgcacgagctggcccggctgcaacctttgccgttgcacatcccgctgcccgccgatcctcggctgggtgagctgtgccgcgcctttttgcaacaccccgacgcccacgactccgcgcagcggtgggccccgcgtctgtacatgagcattcgcaccttcagccgcttctttcgcgcgcagaccggcctgcctttttcgcaatggcgccagcgcgcctgcgtggtgttggcgttggcgctgctggccgaagggcacagcgtgacgcaggtggcgatggagatgggatatgacagcagcgcggcgttttcaaccatgttccgccgcgtgctggggcaggcgccctcctcctatctgacggaagacgggcgcgacggttgacggattagcggaatttcttgtggttggcgtcgcgggtttgtttgaagccttgcgccaattgcttcgcttcggcgactttgccctgattggccagcgccagcgcctgatcgatctggccgatcagggtatccaacccgctgcggaaatctttcatctccgggctgtcggcggctttgtcttccagcttcggcggggtgccctgtttggcatcctgcgcggcggcgcgcatgttctgcaggctctgtttgagggtagcggcggagtcggtattcagcaccgttttgtagttttccgccagggtgtccatatcgtcgcccagatcggcggcgaccgccagcgaactggctgccagcagcgtcaacgccgccaacgctttcagggtattctgcatgtttgctcaccttccagttattgttgtaattaacccaccgttaccataggcaaggccgggaaaaatcgaaaccggagatttgtaagcaaggttgagacgggataacgcgcggccggcgggcgccggccgcgcagcggatcactggccggcgatcttcatttccggcagcagcaccgaaccgcactggatattgctgcgggtttcgatatcgctgccgacgctgacgatgtttcgcagcatgtctttcaggttgccggcgatggtgatctcgctgactgggtactggatctcgccattttccacccaaaaaccggcggcgccgcgagaataatcgccggtgacgccgctgacgccctggcccatcaattcggtgaccaccaggccggtaccgagctgcttcagcatgccggcgaagtctgcgccctgcccggcaatgcgccagttatggatgccgccggcatggccggtgctgtgcaggcccagcttgcgcgccgagtagctggtcatcagccaggtttgcagcacgccatccttgacgatatcgcgccgctgggtgcgcacgccctcgctgtcgaacggcgtcgacgccagccctttcagcaggtgcggatgctcctcgacggtcagccacgccggcaggatctgcttgccgagcgagtccaacaggaaggtagatttgcgataaacgctgctgccgctgatggcgcctaccagatggccgaacaatccggtggccacctcggaggcgaacagcaccggcgccttcatggtcgacagtttgcgcggcgcgagacgcgccagcgtgcggcgggcgcactcctgccccacccactcggggctgtgcagatcgcccatcgcccggccgatggtgtaagcgtaatcccgctccatgtcgccgtcctgttctgcgatgacgcagctggacagcgagtgacggctggaacagtagctttgcagcatgccgtggctgttgccgaacaccttgatgccgtagtggctgttgaagctgccgccttcggtgttggtaatgcgtttgtccgccgccagcgaagcctgctcggcgcgcgccgccagctcgatgccgcgctcggcgtccagctcggtcgggtggaacagatcgagatccggcgcctcgaacgccagcagatctttctccgccgggcaggcgcagggatcctcagaggtatagcgcgcgatgtccagcgccgcctgtacggtgcgagcgatggcgtccgggctgagatcggtggaagaggcgctgcctttgcgctggcggtgatacacggtaatgcccagcgcgccatcgctgttgaactcgacgttttccacttcgccgaagcgggtgctgacgctgatgccggtcgatttggtgaccgcgacttccgccgcgtcggaaccggcgcgggccagctccagcgcctgagaaacggcctgttccagcgccttgcgctgttctgcaacttgagtgactactttcatcaatctgccataattaatcagaaaatcgttgagaaaagtgccggagcggcgtagttgtgcacgcggagcggcgcgcaaaaatcctgagatctctgccgttgagtctaacaggaaccgcgttgaatttcgcataaagccggcaacctgttaggattagcctctttttaacggagcctaccatgaacaaacagcctgaagactggctcgacgatgtcccggagaatgaaaacgaggacgatgacgagattatctgggtcagtaaaagtgagattaaacgtgatgccgaagcgctgaaagacctgggggccgaaatggtcgatctgggcaaaaacgcgctggatcgcattccgttggacgaagatttgcgcgccgccatcgagctggcgcagaagatcaaaaaagagggccgtcgccgtcagctgcagctgatcggcaagatgctgcgcgcccgcgatatcgagccgatccagaccgcgctcgacaagctgaaaaaccgccacaatcagcaggtttcgctgttccacaagctggaagcgctgcgcgaccgtctggtcgaagaaggcgatgacgtcattccgtcgatcctggatctgtatccggccgccgatcgccaacagctgcgttcactggtgcgcaacgcgcagaaagagaaggccgccaacaagccgcctaaggcttaccgccagatcttccaatacctgcgcgagctggccgaagcggccgactaagcgccgccgccatcccgggatgaacccgtttcatccccggtgatgtgccggttcgccgctgctttcgcggatattgaagcgcaggctgccttccagctcttcttccgcctcttcaaacagcagaatgatcgcgccgaaacgacgcttgctgcgggcattcaggtgagtgaactcgatttccaccggcagaccgatatcgccggtcactacgtcccacagcgcgtcgaggttggcgccgaatccctcgtccagcgcaaacttgtgcgcaaaatcgcggtagaaggtcggcacatcctggatctgttcaaaatcaaactctacttttgccatcaaactcactccacacgaatgaagtttttgtaatggtcgcgcgtgacgaagatcagaccgtcgctcgaatacagcaggcgatcggcgccgcgccggccacactggtaattgatgtccgcttcgcgccagacccggccgccggcgctcggcagttgcccttcacggttagagaatcgatcgccgccaatcgccttgcccggcaataccgcacagaggttgcctgaacgcgggtcccagccctgctcgcgcgcctgcttcttggtgacgtaatagcccggaagccgctgatgctgctgcaggtagctcaccaccgtttgctgctgcgtgagccgatcgatgctctgctgttgccccgccggcgcttgcaccaccgtcgcattgccgccgatcgcacggtgctcgttgccgcgcagcgcgctgaagacggcgatgaccacggcgatgacaatcgccaacagaatccgcttgttcatgacattccctgaaattatgccgccgaaggcgccgcagctcccccaggctagttaggtatatagccgaccaggatgaaactaagatgaccggcacgtcacgttttcgcggcggtaagcgtttcatccactcatgacaatgatgccactttccagccgttctggcactcggagtctctctgaaaacgggccgcctcacatgagacggctcgccatgccaggcgctgctttcagtatagtcagggaaggcgccgcacaacgcggcgcaacaggagggaacgcatcaatcgatcaaggcgtgacgatagcgatgcagcatgtcggccaggcgtttcaccggcccggtgacgctgagcggcgcctgattgtccaccagcttctgctggtactcgttcatttcacccagcaagcgatcgtagtaataggcgcgcttgacgtcgttcttggcggagaccacccgatcggcggtgctgcggatctggcggtggaaggccgacagctcttcgctgaccggaatctccgcccgctgcatgcgctggtgggcaatgatcaggttcaacgccagacgatacttggcgatgtcgttcgggaacatcatcagcagctggttaagctgctgatacagcgcaggcagatggttttgccgacgacgcgccgccttggtggtcagcgccgacaccgcgctgctgacgaactggttgagcaacgtgcggccggtgcgttcacgcgaattgtcgcggatcaacagcagcaccatcagcccaacgcagctgccgaggaactggcccagcgccccgtcgagaaactgggtgacgttgaactccatcgggttgctcagcaccagaatgttgatggtcccggccagcagccccagcgaaccgagccgccgcttctgcacctcgatgccgatgaaaaacgccagcaggccgaggctaagacacagcagcaaaatgctctgctgcgtcgccggcaggatcaccatgaagaacagagagccgaccgggatcgccgccagcatgcccagcacgaaatccatcgccaccatgcgcggtgccggggtgcgcatcgccagcgaggtgatgaccgcgatgatcaccataaaaccgctgccggacgtccagccggtccacagccacagcaggctgccgaaggccgtcgccacaaaggtgcgcaggccgttgatcatcgcgtgatgcccttccgccgaagtcggcttgaccacggtttcgttgctcaacaccccctcttccaccgcgctgatgctgcagttggcgtgcacgcctttcgacagcagcaggtagcgcgtcgccgcgccgacccagccggtgagggtcggcagcgtttcctcggaacgatgcgtggtcagcacctggcgcagcagcttcatgcgcttgtggatctcctgcggggtttccgccgggaccatcagctgctcacgcaggctgtctttcagcgcgtccgggtgattcaacaagatcagataggtttcgcaggcctgggtgatcagcgtcagcgacagggtatgcagcgcttttacccggcggttgaccttctgccagcgcgaggactccatcatcaggttgttgcgcatgccgtccagcgccgtggtgctcttcaccagattgctccaggcgcggtcgatatcctctttgtcggcattgctgatgcacatctgcatcaggcggtattgcgccaccagcagttgatccaccgcccgatcgatgtcctgtttgatcgaacgcggcgagaacagcagatccgccaacacggcgctgacgatccccagcacgatctcgctgcaacgctcgatggcgaactgcggcgcttccagcagatgagactcgctggtggcgaccgtcacgatgatgatcagcgcggtatacccggccagcccccaggcataggagttctccaccttgataagcgaagagagccaggtgcagaaaccggcccagatgcagcacagcaacagcatcaccaccggcgcacgggcggtggtgatgataatgatcaggccgacgaagcaaccgataaaggtgccgataatgcgcagccagccgcggtggcggatggcgccggagaagggttcgccgccggcggcaaaggccgggccggcggcgacgatggcggcggtcatcgccgaccagcgcggggtttccagattgagatggaagccgacgaacagcgcaaacacaatcgcgaagctgagtttgaaggcgaatctcagccggataaaggttgggctgctcattagccgaactcacgcagccggtgcatcaggcgcacaaaaggcgagccgctgtcggcattgcgatcgttcttgccgacgatcaccacggtggcggtggtgccggccgggtacggatgctgttgatccttggcgtccagcaggatcttcaccggcacgcgctgcgccaggcgcacccactccaggttgctgtcgatcgaggccaaccctttgttgttcaccgtgctgctgctgttgttcaccgccgccgccacgctgtcgacggtgccgtgcatgatacggttgctgccgagcggggtgatctccgcgcggtcgcccttattcaggccattcagcttggtttcttccaggtacgccaggatgtagaaggaatctttcttcaccagcgccaccgccaccgagccgcgggtgatgtattcgccggcatggacgttgaggttggtgatccagccatcggccggcgcccgcaccgtggtgcgttccagatccagctgcgccagctcgcgtgccgcaatggccttcgccagctggtgctgcacggtctgcagtgagttgttcgactggtcaatctcttcctgcgacatcgcctgcacgcccagcttcacgcggcggccggcctcgcgccgtttttccgccgccagcgtctgatagtaggcgacgtcggcgccggcttccgccagcgcctgctcataacgcggccgatcgaccacgaacagcacctggcctttcttcaccagttggttatccaccaccggcacgtcggtcagcaggccgctgacgtccggcgcgatcgccaccacatcggcggtaaacttggcatcacgcgtccacggcgactcggtgtagaacacccaggccttgaatatcgcggcgatgcccaacagcacaagaatcaaagtgatcgcgattcgggttatttttatcgaaaaatttttcacagcgacctcaaacaaaaagacacgaaatcagataaaacaagcagcaatacagcgcggtattaaacagcgccggatgccagacaaaatcgtaaatccccgtcggctgcagcaggcggcgcaggagaaaaaacagcgccagcgacaccagcagctcgaaaaacaccggcggaaacgacagcccgaagatgaccataaccggaagcaaactcatcactttttccttattgttcactacgccggggaaagacacatctcgccattcacattctctttacattttagcgtgcgcgcgccacaaatcttgaccggacagcttgtccaggtcacgaacccgaaaaaaggttaaacttgggggcagacatccacgacagggattgcgagggtgccggaggagcggcaggattgcgttgccgatcgctctcgcacgttggtaaggtctattcacccgaccacgttatattagcctgcttactatcaaggcatcaacaatctgtgatctaaatcacttttaagccagagtgaataatggaaagattaaaacggatgtcggtattcgccaaagtggttgagttcgggtcgtttaccgcggccgcacgccaactcgacatgagcgtttcatcgatcagtcaaaccgtctcgaaactggaaaatgaactgcaggtcaagctgttgaaccgcagcacgcgcagcatcggcctgaccgaggccggcaaaatctactatcagggctgccgacgcatgctgcaggaagtcagcgaagtgcatgagcagctgtacgcgtttaacaatacgcccgccggcacgctgcgcatcggcagctcgtccaccatggcgcaaaacgtgctggcgaacatgaccgccgagatgatgaaagagtatccgggcctgacggtcaacctggtgaccggcataccggcgccggatctgatcaccgacggactggatctggtgatccgcaccggggcgctgcaggactccagcctgttctcccgccgcctggggcagatgccgatggtggtgtgcgccgccaaaagctacctgatccagcacggtacgccgcagaagccgagcgacatggtcaacttctcctggctggagtacagcgtgcggcccgacagcgaattcgaactgatgtcgccggaaggcatcaccacgcgcatttccccgcaggggcgcttcgtcaccaacgactcctccaccatgatccgttggctgaaaaacggcgccggcatcgcctacgccccgctgatgtgggtgatcgaagagatcaaacgcggcgagatcgagatcctgttcaaaagctaccattcggatccgcggccaatctacgcgctctataccgagaaggacaaactgccgctgaaggtgcaggtgtgcatcaactatttaaccgactatttcgaacgcgtagcggcggtctatcagggttatcgctgagcagcgcttaaatagcggcgcgccagcgcggccagcagcatcagcgccaacatgccgatgccccacagcagccagacggcgtagcccgcccaggtcagcagcagaggaaaatagctcgccagcccgctgcccagctgtttcagccacggcagccaggcgtccagcaccgcctgcggcaccaggctcagcgcaccgttcaccggcaacgatgccttcccggctgcctccgccaacgccgggagccaggtcagcaggccggatacgccccaggccagcaacgtccacagcgccatggcgccgagcagcagcgcgaccgtccagccgccccgattcacggcacaccgccgccgcactgcggacaaaagcggctgcccggcggcaacggcgcggcgcactgtccgcaggtggcgctcactgcggcaaacggctgaccgcagcggtggcaataacgggcgcccgatttattcactgcccggcattccgggcactgcggccccggctcgccatgctggttatagcggttgccatgatgcccgccgccgtggcccgcgcgctgatgaccgccgtgaataccgccttgccccaacaaccgtttcagtaagctcatcccgcctctcctctgtgcattgacgctgaacctcactgtaaaccctggagtaaactccagggtaaagcctggcgagcaggatttacgtttcattacatcgtaaaattggcaaggctttgatgccgttaacaaaagcaccatcggcattatcccacgccgtcgcgctgcgttatgctgcggaaacctctccctgcatcaggaataaccatgaaaaaaatcatactggactgtgacccggggcatgacgacgccatcgctctattgctggcctggggcaatccgcagatcgacctgctggcggtcaccaccgtggtgggtaaccagacgctggacaaagtgacgcgcaacgccctggcggtggcccgtatcgccaatatcaccggcgtccccttcgccgccggctgcccgcgtccgctggtgcgcaatatcgaagtggcgcccgacattcacggcgactcaggcctcgatggcccggtgctgccggaaccccacctgcagttggactcacgccacgcggtagacctgatcatcgaaaccgtgatggcccacccaccgggcagcgtgacgctggtgccgaccggcggcctgaccaatatcgccatggcggtgcgtaaagagccgcgcattgccgaacgggtcaaggaagtggtgctgatgggcggcggctatcatgtgggcaactggagcgcggtggcggagttcaatatcaaaatcgatcccgaggcggcgcacatcgtgttcaacgaaaaatggccgctgaccatggtcgggctggatctcacccaccaggcgctggccacgccggcagtctgcgaacgcatcgccgccctcggcacccggccggccgccttcgtcggcgaactgctggcattctttgggcgtatgtaccaacaggcgcaaggcttcagcgccccgccggtgcacgatccatgcgcggtggcctatgtgatcgatccgagcgtcatgacggtgcgcaaagcgccggtaaatatagagctgaccggcaccctcaccttaggcatgacggtcgcggacttccgcgcgccgccgccgccggattgccacacccaggtagcggtcaaactggatcaggataaattctgggatctggtggtggatgcgctggagcggatcggggaggtggagtaagcgaatgagaaacgagattaacgcgcttttacaggcgcgttagtccgtattctgccgcggcaacgggaggctcaggccataacctcttttatttccaatacagcagaacaatcctaacaataaatcattttataaaaattaaaaaaaacaggcaaagacaagaagaatcttaataaaaataaaaccataaaaatcacattgaatttaaaaaccagcaatggaaaacgatggaataaatctccgccgtcacgccgccgctgacgaaataaattaaacaataagatacctattttattcttcacattgactgccgacataggccatcgccgagatgccccacgatattcacacacgtcaagacaaccatcaaccaactgatttcaatgaataaaaataatattagattaaaatttgactgaatcacaatggatttgagaaaatagcgcatctgtttttgcaaacaacaaaaatgccttttgcgggtgaaaaatacggcttaacctttctttaggcacacggtctcgcgcattctcaggggtaaacattatttatcgcttcaccatgaagacggattaaatttcccatgagacattttcgaattgaacattacacgcatttcaacatcaggataaaggatagggaataatcaaaacatgcatttcataaacgctatcaggccatggcaggttaaccatggccgataaatctcccgctaacgcagcgaccatcgccgtgctgcccctgctgctgatctggatggcggcggtcctgccggtttattaccccaacatgggcggcgacggtctggcgctgccgcaaaacattctggcctggagcgtcatggcgctcaccacgctgatcgtgacgtttaccgtttgcctgggtcgcatccgtttttcgctaacccccaccgcccggcggttgctgctcggcatcgccgtactggcgttgccgctgctgtatacccgcctcgagtggcgcgaagatgccctgtggcgctgcgccggtttgctcggcggctggctgttctatgtcgcctgcctgcagctgcgcctaaccgcccgacagcgcgagctgctgctgtacggtctgctgttcgccatcggcgttcaggcgttgctggcggcgctgcagctgttcgcccccacgctggcctgggtagcccctaacggcagccgggtctacggcgtctttcagcaaccgaacgtgctgggcagctttatcgccaccgggctggccttggcgctctggctgctgcttgctcccctctcagcgccaacgtggcggcggcaaatcccgctgctcgcgctgctggccgttttctccgccctgctggtactgatccagtcgcgcgccgcctggcttggcggcgccttggcggcggctttgctgctgtgccgttttgcccgccggcgcccggccgcgagccgctgggccggcggcgcgctgctgctgggcgtggcgatcggcctggcggtgctattcaccggtttcggcctggatggccgcgcgggtctgatcggtcgggagctgtccaatagcgctcgcctcaccatgctgcatgacgtcggcgccatgatcctggccaagccgctgctgggctggggttacggcggttttgaatacagcttcgcgcactttcgcctgcaggaaatgccctggcgagaagtgttggaagtcgccgggcatccgcacaatgaaatcctgctgtggtggattgagggtggcctgccggcgctggcaggtatcgctatcgtccttgccgccggcgcacggctgctgaaaagcgcctggcaacgggatcgagaacagccgaacggtgcgcgtgtcggcttgttcctggtgctgctgccgatgctggtgcacacccagctggaataccctttctatctgtctgcgccgcactggctggcgtttctgctgctgctggcgttgctggatggccaaagcggcgagcctcgcccgctgccgttcgccaaagccctgagcctgccggtggcggtggcggcggtcggcgtgctggtgatggcggtcttcgcctggcaagggcgcatggcgctcacccagtcggagcgcactatgctggccaacatcgacagcatcgagcagatgccgtcgccggccgcctggatctaccgggagcgcaaaaccttcgacgagcaatctcacgcgctgctggtctacaaccagacgcgtgatgatgccctgttgaccggctatcggcagtgggccaatgcctatctgcagcaccgcatcgacgccaacgtctacgccacgctgattatgatcttgcgctatcagggggatcaggcacaagccgacgctcgcctgcgggaagccgctttcctgtttacgcgggatgcgcggtttaggtagggcaacaaggtgagagcgatgcctcgtcgctctcacctgcgtcatttatgtagcaaaatcaacgcggcaatatcgcgcactctttatccagcagcgactctaccgacgcgcgattgccgacgtcccagccgcgcttcgaggccagcaagataaacccttgccggccggcaaacatcgtcggaacgatgaccacgccatattccgccagctgcggcggcgacagatggaaataatccgccaaatccttaatcgggtagatgcccatcacggctggctgcatcacgcggcgagcataataggtgtggcgcaacaacttatccggcaaaggccgccattgttcctgtatgtaggggcgttccgcctgcaattggcgccgcacgtcctcgcgcagacaggtcaggtgaatgtgcaactggttttggctgcggccgtaagcggagttgatcgccatgcccaacatatcatccggcaccggcccgccatactcggcggccagccggtaacgcatcagccaggcatagccaaaatagtccgtccgttctccaaccagcagctgcgggctttcaatgccggagagcggcgccgtcggcaccaggataaagtgataagggtaacgcgggttctgcagcacgctaaagcccagggccttcccctgcggcatataaatctgctcgcacggggccggattgcgtttttgctgatagttggccatgcagagtttatcgaccacgccccacagcgcatcggaacgggcgcagcccgtcagggacagaacgcccagcaccagcagccaacgccgagcggataatgccaggcgcgtcattcttgtcgtgctctgttttttcgccacgtcaatttcattccattatgtcgtgcaggctacggcgtcctgccgcgcttagcgttacgaatgcgagaaaggccgcgaaatggagcatggttgaggggccaacgcgtgaccccttgaggaaagattacgccgtgccgccgacggtgagcgtgtccagtttcagcgtcggttggccgacgcccaccggcacgctctggccttccttgccgcacacgcccacgcctttatcgagcgccagatcgttgccgaccatagagatctgctgcatcgcctcaatgccggagccgatcagcgtcgcccctttcaccggtttggtgatgcggcccttttcgatcaggtaggcttcagtggtggagaacacgaacttgccggaggtgatgtccacctgaccgccgccaaagttcggcgcgtacagaccgtactcgacgctggcgatgatctcttccggcgtcgattggcccgccagcatgtaggtgttggtcatgcgcggcatcggcagatgcgcgtaggactcgcggcggccgttgccggtcggggcgacgcccatcagccgcgcgttgagcttgtcctgcatgtagcctctcaatacgccgttttcaatcagcacgttgtactggcccggcacgccttcgtcgtcgatcgccagcgagccgcggcgcccttgcagggtgccgtcatccactacggtgcacagttcggacgccaccagctcccccatatggccgctgaataccgaggtgccgcgccggttgaagtcgccttccaggccgtggcccacagcttcgtgcagcagcacgcccggccagccggcgcccagcacgaccggcatattgccggccggcgccgccaccgcgccaagattgaccagcgccatgcgcaccgcttctttggcgtaagcgtcggcgcgcacgtcgccgtcgacggtttccaggaagtaatcgtaaccgaaacggccgccgccgccgctggagccgcgctcacgcttgccgtcctgctccaccagcacgctgacggagaggcgcaccagcgggcgaacgtccgccgccagcgtgccgtcggtggcggccaccaacacctgctcgtaaacgccggtgatgctggcgttcacttcctgcacccgcacatcggcggcgcgcgccaccttgtcgacgcggtgcagcagagcgattttctcttcgcgcggcaggctttgcagcggatcgagcagcggatacagcgcccggtaaccgatttcgcccagggtatgcgcccgcccgtcgccctgctcgcgcacgatgctgcgcgccgcctgggcgctctgctgcagcgcattcagggtgatctgatcggcataggcgaagccggtcttctcaccgctgacggcgcgcacgccgacgccctggtcgatattgtaagagccatccttgatgatgccgtcctcgatcacccaggcttcgtgatagctggactgaaaatagagatcggcgtagtcgatacggcgttctgccagttgacccagtaccctgtacaggtcttgatgactcagcttgttggtagcgagtaactgctcactgacaaacgtcaggctcataatggtttcactcttgattggaggatagcttgtcagacggcgccgtcagcgacgtctggaatcggttgtgctgcagcaccggcatctgcgcacgaatatttttcaggcttgcggtgtccacgcgcaccttcagcgccgccacggcgtccgcgttctcggccagcaccttgccccagccgtcaacagccagcgtgtggccccaggtacgacgagtcggtccgtggcgccccacctgcgccggcgccaggatcatgcactggttttcgatcgcccgggcgcgcagcaggatttcccaatgcgcctcgccggtgacccgggtaaacgccgccggcaccgaaatcagttcggcgccctgtgcccgcagcgcctggaacagcgcggggaagcgcagatcgtagcatatggtcatgcccaagcgcccgaccggcgtatccaccaccgtcaggtgctgcccgtgctggtaggtatccgactcgcggtagtggccgtgcgcatcgttgatatccacatcgaacatatgcagtttgtcatagcgggcgcggatctcgccctgctcgtcgaacaacaggctgctggtagtgataagttccgggttttcgcggctgatcaagggcatcgagcccaccagcaaccacaccccatagcggcgcgccagctcacgcaccgcgttctgcagcgggccatcgccctgtttttccgcctgttggcggtaggccgcggagttggcgaacagcagcgcgttctccggcgtcatgaccagttttaccccggcattgagctgcttgatctgctgttcaatctgggccaggttatcgcgcacctgatcgccactgcacaactgcaacaacgcaacgttagcattcctcatgacgccttatcctcctttgccttacgaagtacctcattgatcttcggctggtcgagatcgccgccgatatggtagcgaatcagcgaaatcttgctccacagcggccccagcacctgcgaggcggcaaataccgccgcgccgacgatcgggttgacgacaaacgccgtggccacgccgacggtcgccgaaatcgccggcgccaccaccgcctccatatcgatgcggcggcgcgccagatcgatctggccgctcatggcgatgtccgccgccaggccgtcgatcaatagattatcagtatgcattatgccatctttcagccaggcggtgctgcggatggaatcaaagtagaaacctttgccgaaggtatcgctgaaatcgaactgcagcttgcgcagcagggcgtcgaagctgaccagccgcagcagctggccggcgcggccgccgcccatgctgtcgatctcgcccttgcccatcttgacctgcagcgcgccgcttaacgtatcgacctgcggctgccacggcgcgccgtgccagtacagatcgaagtccacgtcgtaaggcgcccccttcagcggaatagtgatgccgaagaaggcggcggtttcatcgatcttgccgccgagcagtttgcctttcagcgagctgcgctcttcctgcgcgttttgtttccacaggccggtggcgctcatacgccctttaccggtatcgaccagaccgtgatccagcgtcagggtatccccccgattagtcagatccgcctcgaccttgccgaggttctgccccagcacccagcacgacttacagcgcagcatcagcgaaggccagtcgcggaaggaaactttctcggtcgacggcgacggtgcgcccgccgcgtttttcgtctcggcgaactgtgggttgtaatacaggtagttgatatcggcgcgccacggcccgcgatcggccacccgcaggctgccgtccacttcgtcgctcttggcgctcaccagggtagcgccaagctgtttttcggccgatagcgtcagcttatgccaggcctggccgcccaacagcagctgcggcgtagtcagcgccacggtggtagggaagctgaaaccgcccacctgaccgctgccgccgccctgtttcagtgccggcgccagcagcgccagccactgctcaccgtccagcgccggcagattcagcgtcatcgacttgccggccggcagcggcggcgtgccgcccccgttggtttgccaggcggcgcgcgccagattcacctgttttttatcgaagttccattcgctgttgaagcggttctgtttgcccgcgctgccggtcaacatgaaaccgttcagaccgcctttgaccttgacgttcaccggcagtgcctcgcccgctgccttgtccagcggtgaaggtaagtgactgctcactttcttcaaatccgcgtcaatgccgatatcatagctggccgagccctgatgcggcagcgtgatggccacctggctctgccagggcgcgctgccgctgagcgcatcagcggcctcttttggcaggccggggaacttgcccggctgccagtcgcccttcaggccgacattgatcttgtaatcgcgatcgccttcctgcgtggaaaagttgaccgccaccggctgcccgaaccagttggccgacagggggtcgctctgcaggttgccgttgtcgaagcggaacttgccgctgagcttttgcagttcgctgtccagcggctttatcagcaacgaattgttgttcagcgccacttcgccggtggctctgacctgctcgccgtccaggggaatatcaagatgtaagcgcccactgacatcaccgccaatctgcagctgctccagcgccgccccgagcgaatcgtgcaacggcgtctgcatgaagtagtcatgcacgtcgctgcccgcacccgcgacttcggcgtcgatcagcagccgctctttcaggtaatccgggatcaccgcgctgatatttttacccgccaccttacccaatcgggtttgcggcgcatgcatccacaatccctcgttggcgaaatcgagatcgatcgccaaatcggtcagcgccggccagcccggttggaactggaaggtggcgtgacgtagcggtacgaaaacttcaaactgcccttcgtttttacgatacgggaagtgctgcggatcgccggaataaatcagcgtagcgttatccacctggccgccctgaatggcgccgctcaggtagtccaccagatgcttgcccatcaacggttccgggaaatagcgccaggcgtcggcgccgtcatacaggcggatgcccgccaggatgttcagccacggatcgcccttggccggctgctgataacggaaatcaccgttgacccacagcgacttcgccttgacgtccagcccctgactcgccagctcccagccctgatcgttgtaacgccaggtcagcgcgccgcgcgcgctgctgatttcaagcggggcgcggaacatgtcgccgtaaggcagggtgctgtcggtgagccccagcgtcaggcggccgttctccaccccgccgctcaacgccccggagaagtggttaacgcccggcagcagttcccaacgctgccagctgacatcgcgccacagcgcctggaaacggctcttttccggctgcttgagcggaatgtccagcgccagcgcttccaattgcccctgcggctgcagatcgttccagcgctcgagcacgtccgggctgaggaaggagaaggtcggcaacagcgccgacagacgctccagctgaatatcagtcgcgcgcacacgcagttcttcattctgcgccggccccatgaattcggtgttttccggcagccacagcgcggaaagcgcgccctgcggccaggcctggccgtcggtgctcaaccgcagttgcggcacgtcgagctgccaaccggtgccctggcggcgcagcgacagcgccagattatccacgtccagccggtgctgcgcggcgccggtgtcccagttggccgccccttgcttgagcaacgcatggccgccggcgatctggccgttctgcacctgcagccaggcagccaggctgaagtcggcgctttccagcccggtgttggcgcgcagccagcgggtaaaccagggtttcatgtcgatgttatcggcctgcaggtagaccgtgccggtatccagcaggccttgattgtcacgcaggtccatgcgcagctgcaccacgccgtgctggccattcagcgtcgacaggctgatctgcccctcggcgcggtggcgatcgcggccgttgagccaggtcagctggggaatgtcgaattcggcgcgcgcgccggcgggcgtcaggaatgaaatacgactgtcgcgcagatcgaaatggtcgagctggcgcagcatcagatcgctgattttaccgggttcaaggccatcgccctgccgatcgccgcccagcgtggcgttcaaatcaagccggaattgatagaaggtcagatcgcggaactgccagcgccagtgcaacagcgactgccacacatccagcgccagcgtcacgcgctcgatatgcacatcgcttttgggcagcgtaacgctcaggttacgcacttcaagctgcgggccgaaggtttcccaactgccctgtaggaaatccatctgcacgggcacgccggacagcttctccacctgcgccagcagttggggacggtagtcgttcagcttcggcagcatcaggcgcagcccgctgatcagcagcgccacaatcacgattagggtggcgcctgttgctaacagaatcccaggcagtcgcctcacgcagttctccttgctccgctgcctggcaacgggaatatctatgcactgacgggcccggcgtgccgggcccctaccgatgtcgggcgggctacatcatgacgacgtcgaactgctcctggctgtacaacggttcgatctgcaccttcacctgtttgccgacgaaaatctccacttcggccagcgcatgcgactcttcgctcttcagcgcttcgccgaccgccgcagaggcgtacaccaggaagcgatcggaatcgtaagcgtgatgcacgcgcacaatctcgcgcaggatctcgtagcacacggtttccaccgttttcacggtgccgcgcccattgcaagtaggacaatcgtgacagagcacatgttcaatgctttcacgcgttcgtttacgcgtcatttcaactaagcctagctgagagaagccgttgatcgtggtttttacccgatctttactcaacgcctgctccagcgagtgcagcacccggcggcgatgctcttcgttgttcatatcgataaagtcgatgatgatgatgccgcccaggttgcgcagccgcagctggcgcgcaatggcctgcgtcgcctcgatgttggtattgaagatggtttcgtcgaggttgcggtggccgacgaaggcgccggtgttgatgtcgaccgtggtcatcgcctcggtctgatcgatgatcagatagccgccggacttcagctccaccttgcgctccagcgcgcgctggatctcgttttccacatcgtacagatcgaaaatcggctgactgccggtatagagctcgagcttgttggtgatgtccgggatgtactcaccggtgaactccaccagcagatcgtgcgtcagccgcgaatcgacgcggatgcgatccagcgccgcgccggcgaaatcgcgcaagatgcgctgcgccaacgccagctcgccgtacagcttgtatttggtctggttgcgcttcttgcgctccatcaccttggtccacagccgtttgaggaatgcggcgtcctgcgccagctcttcctcgccgatgccttccgccgcggtgcggatgataaagccgcccagctcgtcgcagtgcggcgccacgatcgccttcaggcgctcgcgctcggcttcgctgtcgatgcgctgcgacacgccgacgtgcgccgcacccggcatgaagaccagataacgcgaaggcagcgtgatatcggtggtcagacgcgcgcccttggtgccaagcggatctttcaccacctgcaccatcaggtcttgcccctggcgcaccagctcggcgatgtcgcgcacgtggaagtttttccgctcatcgccggcgacgcattcggtatgcggcatgatgtcagaggcgtgcaggaaggcggccttatcgaggccgatgtcgacgaacgccgcctgcatgcccggcaggacgcggctgacgcgccctttatagatattgccgacgatgccgcgtttggattcgcgttcgatatggatctcttgcagaatgccgccatcgatataggcgacccgcgtttcagacggtgtgatattaaccagtagctcagctgtcatgccttctcctcagagccggtcgataatggcagcgcccatcaaccggttcttacatcacgtaatgcgacaaaattactgagcagctcatgtgtttcgaccagcggcagaccgaccactgcgtgataactcccggttatcgttctgacgaaacaaccaccctttccttgaattccataggcgcccgccttatccatcggttcgcccgtagcaatatagtcgcggatatcctgttgtgacaggctgcggaacgtcacgtcggtcaccaccagctggcaacgcacgtcgtggcgatcggcgatcgccactgccgtcatcacctgatgctgcttgccggacagggccgccagcatgtccgccgcatgggcttcgtcgcgcggcttctccagcacccggccgttgagcaccacgatggtgtcggcgcccagcaccggccgatcttcctgcgccagcgccacgcccgctttggccttgtcctgcgccaggcggcgcacataggcttctgcggcttcgccttcccggcgctgctcttcggtatgcgtcagcagaatgtcgaacgacacgcccagcagggtcagcagttcacgtcgacgtggggagccggaggccagataaagcgaagtcattgatatacccttactgtacggcgaactgacggcggattttacgcatcaacaggaataaccacggccacaaaatgccgtttaccacactactccagaacacctctgggcggaaagagacgttgatcactaaaaactcagcccagaacaccaccacatccatcgacagcgacagcaacacgacgataagcgcctgttgccacagcgccatattgcggaacagttggaatttgaacgccaccagataggcgatgatgcccagcgccagcgcgcgcacgcccagcgtggaaccgaggatcagatccatgatcagccccagcacgaagccggtgccgacattaacccgatgtggcaaagccatcacccagtagatcaggatcagcaccagccaggaaggccggaacatgtagatctgctccggccacggcatgatttgcagcaccaacgccaccaggaacgacagccagattatccagcgcccgtggctgcggtagctgttcattgcaccacccccgccgccgcaggctgaacctgaggctgagcagacgccggagcgccggattgcggcgccgcaccagcggccggggccggcagctgcggcccgactgaaccggccggcggcagcacctgcggcatcatctgcatcaggcgctcattggccacgcggtgtacttcgtccggcggcagcggcatgtcgccgttgcgatcggcgccccacagcagcagcaggtagcgcaaacgctgcagaccggcggttggccgcgcctgaatcacggtgtaagcgcgctggttgtcgaccttgaccgaggagaccaccgccaccggataaccttccgggaagcggccgccgaggcctgaggtcaccagcacgtcgccaacgcggatatcggtgttgttcggcaggtgttccagctgcagatcgtcggcgcagccgctgcctgcggcgatcacccgaatatcgttgcgcagcacctgaatcggcagcgcgtgggaggcatcgcagatcagcagcacgcggctggtgaccttcgccaccgccaccacctggccgaccacgcccttgtcgctgatcaccggctggccttcatagacgccgttgtccgaccctttgtcgatcaccacctgatcgctatacggatcggaaccggtggagatcacctgggtgaccatcttgtgttcgtcctgacgcagcggagaacccagcagctcgcgcaagcgggcgttttcctgcttgaattggccaagaagaagaatatcgctgtttttcagcagcagttcctgccgcagagcgcggttttccagctccagctgttggcgggtggccagcgtctctgacacgctgtccaaaactttacgcggcccgttggccagaaaatagaaagggctgactgcggtgtccatgtagttgcgtatcttcacgaacgtgccgagccggctgtcggcaacgatcaggccaatggccgcaatcaccgccaaaaaaagtcgcagttgcagggaaggccccctgctaaaaatcggcttcataaattatgcgagttcctcgacaacagaaagaggaaccgtacccgattctcgctgtgcgcattcatccgatacgattcctccttccaggggctgactattcttcgctgaacaaatcgccgccgtgcatgtcgatcatttccaacgccttgccgccgccgcgcgccacgcaggtcagcggatcttccgccaccacgaccgggatgccggtttcttccatcagcaagcgatcgaggttgcgcagcagcgcgccgccgccggtcaataccatgccgcgttcggaaatgtcggaggccaattctggcgggcactgctccagcgccaccatcaccgcgctgacgatgccggtcagcggctcttgcagagcttcgaggatttcattggagttcagggtaaagccgcgcggtacgccttcggccaggttacggccgcggacttcgatttcgcgcacttcgtcgcccggataggcagaaccgatttcgtgcttgatgcgctcggcggtcgcttcgccgatcagcgagccgtagttgcggcgcacataattgatgatggcttcatcgaagcggtcgccgccgatgcgcacggaagaggagtacaccacgccgttcagcgagatcaccgccacttcagtggtaccgccaccgatatccaccaccatggagcctgtcgcttcggaaaccggcaagcctgcaccgatcgccgccgccatcggctcttcaatcaggaacacttcgcgcgcgccggccccttgggcggactcgcggatagcgcggcgttcaacctgggtcgcgccgaccggcacacagaccagcacgcgcgggcttgggcgcatgaagctgttgctgtgaacctgtttgataaagtgctgcagcattttttcggtcacgaagaagtcggcgatcacgccgtctttcatcgggcgaatagccgcgatgttgccgggggtgcggcccagcatctgtttggcgtcatgaccgacggccgcaacgctctttggggagccggcacgatcctgacgaatggcaaccaccgaaggttcattcagtacgatgccttgccctttaacataaatcagggtattggcggtacccaagtcgatggacaagtcgttggaaaacatgccacgaaatttcttaaacataacgaaaggataatcctgcaagctgggggcggaaaataaaatccgcctactttaccaaccacacgaagcagcgacaaggcgcaaaaacgttctacttcggtgaaaaatagtctgtattgtttctgctcgaatgcacggaaattggatgaggcctgaattccctgaacaaaggctcagtttaccaccctgtcaacgcacgaaacggcgtaacacagctcataaaatctaacatattccctgattgccgccgatggtaagcacctaccaacgccaaccagataaaagctgacaagagcctatctcaaataggcgtcattgtcgcaggcagattggagaaaactccaaaatgacgggtgacatggcccagatggatccggcgctcattctacgtcaatttttgtccggcaatcagcttaaacgcgataacgacgtgaatattttttacgccccgcgtcgatcggttccggcgacgcgaaaaagtcgccctgcccgccatggatcccacgctctttcagcgtctgccattcgttgcgcgtacgtacgctggcggcgaacacctgcgcgcgcgtacccgcgcaggcgccggtcaggctctgcacgaacagctggttttcgtcccgcttatcgatgctccgcaccaaccccgggtggagcttgacgatctccacctgcagcgacttgatataggacgtactgaccacggttaaacccgctttggacaccgccaggcggcagcccagccctgacaacagcctcagcaccggacgcaaacggtcgatatgttgacacacatctgcctccgcaagttcaatcagaattcgtcgacgctgacttttttcgcactgcaacagcgtatcccgcagccagcgctggaaagagcgctgcaaaatcgagtctacgcacagcgggaacgccagcgtttcctcgggccactgcgccaacaagggaatgatgcggctcacctgttggcgatcgtaactctccgccaaccccagctgctgcaccagcggcatatattccgccggcagcaattcctgggtgccgtcatagatccggctcatgatctcgcgatggtgcacctcgccttccacggtcaccgccggtttctgatacagccgcgggccgccgcgcgccagcacctgttccagcagcgtgcgccacttgacgctgccgcgccccttttccggcacctggctgtcgtacacataccacccgttttcgccctgcagcgtagcgtggcgcgtcgcctgctccgcataatcgatcacctgctcggtggtttgaccgctgcggtacgccacgatgccgatgtgcaggaaggcctcgcgatcgatcagcgccgtggaaggcaaggcatcgatggcgttgaccagctgtgaagcgatgccgtcggcctccttcagggttcgatgcggcaacaacacggtaaaatcgctgtggaagtagcgcgccagcagcgccgacgggtagcgcatcacgaaggtagacagcaggttgaccagcgaatacatcagctcctgcaccgccacgctgccgtgcgtctcgcgcagggtctcgaaatcgggcagccgcaccatcatcacgatgccgtgcgagccttcatcttccaactgagtggtcaattggttatcgaagaacaggcgattattcagcccggttttggcgtcctgcgcggcgaaggcgcggatcagcgtatcgacccggctgcgctcttcccgcgcttccgccagatcggccagcaggcggtcgagcgcgccgctgacgttggccggccactcacgcacgtcgccctgcatgacgttttcacgctcgccgttcagaatgcgccgcgcgcggcgttccagacgatcttcgccgtcggcctgttcacgcagccagcgcaggctgaacagcaaaatcaccaccatgacgacgatcgacagcgtgacggcggcggtggattgcagcgtacgcacgtcgctggcgaagggatcgaggtaggtgatgtacagcgtgctgcccgggtgctgcaacagggggcgcgagacctgacgatagccgttcagcgcatcccagtgctcttttttgaccgtcggcaatttatagtcgagcagttggctggtcccggcctctatgcggatcgacacgatgccgagcgtgcgcatgacgatgggcaaccatttctcctgctcctgcggcggctcgctcagcatggcttgatcgagagtggtaaccagcgaatccaagcggcgctcctggcgatcctgggtaacgtaaaagaagctgtatgagcatcccatcagcatcaaaaacatcgccagtgcgaccaacagagtgatcaatgcagagagtttggtggtaaatcgcatccctgtgccttgtccgctatggttaagtgagtgtgcccctgtagccaaaaggagccgtccaaccctaacaagccttgccgaggaataaaacctgcaagcgccgtttttgtcctttatcaggacttgggccgcttattatgcatatagtcaaataaatgtgattcagccattgatagaaaagtgtaaacgagaggaagagtgacatgcgtgcactgttattggaacaacaagacgaccaaactctggctcatatcaaagatatcggcagcgatcggttgccggaaggcgatgttaccgtcgacatcaactggtccagcctaaattataaggatgcgctggcgatcaccggcaaaggcaagatcgtgcgcaacttcccaatggtgccgggcatcgatttcgccggcaccgtgcgccacagccgcgacgatcgcttcaaagaggggcaaagcgtggtgctcaccggctggggcgtaggcgaacaccactggggcggcctggccgagcaggcgcgcgtctccggtgagtggctggtgccgctgccgaacgggctggatgagcgcaaggcgatgatcatcggcacagccggctttaccgccatgctgtgcgtgatggcgctggaggaaggcggcgtgcacccggacgacggcgatatcctggtcaccggcgccagcggcggcgtgggcagcaccgctatcgccctgctggcagcgctgggttaccgggtgaccgccatcagcggccgcgacagcaataccgagtacctgaaagcgctcggcgccaaagaggtgatgtcgcgcgatggctatatcgacacgccgcgtccgctggagaaacagctgtgggccggcgcagtggacaccgtcggcgacaaactgctggcgcgggtgctggcacagatgaactataacggcaccgtcgccgcctgcggcctggcgggcggttatcagttgccgaccaccgtgatgccgttcattctgcgcaacgtgcgtctgcagggcgtggattcagtgcatacgccgctgcaccgccgccaaaccgcctgggaacggctggccggcattctgccggacagtttctatcagcaggccacgcacgaaatccccctcgaacaggcgccggccaccgccgccgcgctgctgaacaaccaaatcaccggccgcaccctggtgaaaatccgctgaccttctcccctcggcgacggggggagttcccgcttctgcgaaatttcatattttcccgcgccccctcgcttccggccggctttagcgccatgcttatttcatggagacccgtttgccgcttacaggcggcgggaatcagtcgcggagaacataagcatgaacaaacacccgaaattaaccgaggccgacgtcacgccggagagcgtgttccatcagcggcgcaaggtgctgcaggcgctcggcatcagcgccgctacgctggcgctgcctgccggcgcgcgggcggacctgctgtcgtggttcaagggcaacgatcgccccaaggcgccaccgggcaaagcgctggcattcagcaaaccggccgcctggcaggcgcagctggcgatgacgccggaagacaaggtgaccggctacaacaacttctatgagttcggcctcgacaaagccgatccggccgccaacgccggcgggctgaaaaccgaaggctggaaagtgcgcatcgacggcgaagtggcgaaaccgataacgctggatatcgacgatctgatgaagcgtttcccgctggagcagcgcatttaccgcatgcgctgcgtcgaggcctggtcgatggtggtgccgtggatcggtttcgagctgggcaagcttctcaagctggccgaaccgaacagcaacgcgcgttacgtagccttccagacgctgtacgatccggagcagatgcccggccagaaagatcgctttatcggcggcggcctgaaatatccctacgtcgaagggctgcggctggacgaggcgatgcatccactggcgctgttgaccgtcggcgtgtacggcaaaaccctgccgccgcaaaacggcgcgccgctgcgactgatcacgccgtggaaatacggcttcaaaggcatcaaatcgatcgtgcatatccgcttggtgcgcgatcagccgccgaccacctggaaccaatccgcgccgaacgagtacggtttttacgccaacgtgaatccgcacgtcgatcatccgcgctggtcgcaggccaccgagcgcttcatcggctccggcggcattctcgacgtcaaacgccaaccgacgctgctgttcaacggctatgccgatcaggtggcgtcgctgtatcgcggcatggatctgcgggagaatttctaagtgcgcctgacgcctgttcatatcaaatggctgaaagccgccctgcatctggcggcgtttttgccctttctctggctggtactggcggtggatcaaggctggttcagcgccgatccgtccaaggacatccagcattttaccggcaggatgacgctgaaactgctgctggccacgctgatgatcgccccgctggcgcgctacgcccgccagccgctgctgatccgctgccgccgtctggtggggctgtggtgctttgcctggggcacgctgcacctgataagctactccacgctggagctggggctgagcaatctcggcctgctgggcagcgagctggtgaaccgcccttatctgacgctcggcatcctcacctggctgatcctgctggcgctggcggccacctcgacgctgtgggcgatgcgcaaactgggcgccaaatggcaaacgttgcacaacttcgtctatctggcggcgatccttgcacccatccactacctgtggtcggtcaaaaccttttccccccagccgttcatttacgcactgctggcggtggcgctgttgggcctgcgctacaagaaattccgcgcctggtggcgctgaatcgcgcggcggcgtgcgtgattgtcgttgaaaaacgcaagccgccggcgggaactttttctgtgttccagcgctcatattcctgtcacggaaccccgagttggtcgatttggggttgaatatcttcgctgataagaccagtatttagctgcgaattgctacgatatcgttataatgcccgaccttgtttctgttctcagggtgaatttgccccttaacaggtgacaaatcggtaacatcgggttattttctacgatgatggttttattgccggagataccagcacaatggcggataagtttcacattttgcttctgaacggccccaatctcaatctgctggggacgcgtgagccggagaagtacggcagcacgacgctgacagagattgttaacggattggaaaaccaggcatccgcattggatattaccctgagccatctgcagtccaacgccgagcatcagctgatcgatcgcatccatcaggcgcgcggcaacaccgatttcattctgataaacccggcggcgttcacgcacaccagcgtggcgttgcgcgatgcgttgctggcggtgcagatcccgttcatcgagatccacctgtccaacgtgcacgcccgcgaacctttccgccatcactcttatctctcagacgtagcggtaggcgtgatttgcggcctcggcgcggatggctacgctttcgctttacaggcagcggttaaccgtctgtcgaaaacccactaattgctccacaaaaagagtacggaatcacactcatggatattcgtaaaatcaagaaactgatcgaactggttgaagaatcaggcatttctgaactggaaatctctgaaggcgaagaatcggttcgcatcagccgtgccgcaccggcgcaggcttatcccgtcatgcagcaggcttacgcgatgccggcacagcagcagccagccctggctaccgccgttgccaccgcgcctgcggcagaaacccctgcagcaccggcggccgtgagtggccacgtcgttcgttccccaatggtaggcaccttctaccgcaccccaagcccggacgcgaaagccttcgtggaagtgggccagaaagtgaacgccggcgataccctgtgcatcgttgaagccatgaaaatgatgaaccagatcgaagcggacaagtccggcgtcgtgaaagccatcctggtggaaaacggccagccggtcgaatatgacgagccgctggtcgtcatcgaataacgaggcgcccccatgcttgataaaattgttatcgccaaccgcggcgagatcgcgcttcgcatcctgcgtgcctgtaaagaactgggcatcaagaccgttgcggttcactccgcggccgaccgcgatctgaaacacgtgctgctggccgacgagaccgtctgcatcggtcctgcgccatcggtaaaaagctacctgaacatcccggccatcatctcggcggcggaaatcaccggcgcggtagcgatccacccgggctacggcttcctgtccgagaacgccgacttcgccgagcaggttgaacgctccggtttcatcttcatcggcccgaaagccgaaaccatccgcctgatgggcgacaaggtttccgcgatcaacgccatgaaaaaagccggcgtgccatgcgtgccgggctccgacggcccgctgaccgacgacatggataaaaaccgtgccttcgccaagcgcatcggttatccggtgatcatcaaggcctccggcggcggcggcggtcgcggcatgcgcgtggtgcgcagcgacaaagaccttgagcagtccatcaacatgacgaaagcggaagccaaagcggctttcaacaacgacatggtgtacatggaaaaatacctggagaatccgcgtcacatcgagattcaggtattggccgacggccagggcaacgccatctatctggccgagcgcgactgctccatgcagcgccgccaccagaaagtggtcgaagaagcgccggcgccgggcatcaccagcgaaatgcgccgctacatcggcgagcgctgctcgaaagcctgcgtggaaatcggctaccgcggtgcgggcaccttcgagttcctgtatgaaaacggcgagttctatttcatcgaaatgaacacccgtattcaggtagagcacccggttaccgaaatgatcaccggcgtggatctgatcaaagagcagctgcgcatcgctgccggtcagccgctgtcgatcaaacaggaagaagtgaagatccacggccacgcggtagaatgccgcatcaacgccgaagatccgaacaccttcctgccgagcccgggcaagatcacccgcttccacgcgccaggcggtttcggcgtgcgttgggaatctcatatctacgccggttataccgtaccgccgtactatgactccatgatcggcaaactgatcaccttcggcgaaaaccgtgacgtggcgatcgcccgcatgaaaaacgccctggctgaactgatcatcgacggcatcaaaaccaacgttgagctgcagcagaagatcatgaacgacgaaaacttccagcacggtggcaccaacatccactatctggagaagaagctgggtctgcaggaaacctaaggcagccacgcagcatcgtctgacgaaaggccggttaatcaccggcctttttcttttctcgcgcccgcctgattttttcgttcaaccgcgcaaaatagaatcaaatcttcacagataactttctcttcacatttatccagcccgccaaccacatcaccactctaaacataacaatctgtttttaaacaaaaaatatttaactcatagcttacaaataaatattagcaagggaaaaactcaatccatcgcatttttacacgctataagctttaacaaaattaacgtattaattacaaagcttgaccccgatcacatccgctcggtgatagcccgtgctattgtcgccgtcgatcgaatgcagcgcgctctttttctctttttatttatcctttttattgacttagatgagtaatgtcttaatgagccatgtaactgaatacgaccgtaagcccgtgttttccctgtaccaccgtgctgacatggaaaccataaaaagcattaaggaaaacgggattgagaagcttttgggcgaagtgaagaatttccgcgccaatgaggaaatgaaccgctttattcccgaacaggcacgcctggcagtaagctgggtgcgtctggcaaaaaacgaaaagctggatgtgcatgttcatccaatatcttcgctgtatatcatttgtgaaggggaagcgatcctgctgggagacggcgttgaccgccgggccgttccaggcgatgtcatctgcattccgccaggcgcggatcacggcttcatcggcgcgggcgacaacggctactgggggctgtcaatccagtttgaggagcgcgggctctatgaagatcccagcaagccgctggtgactttcgatcaagatccctacgcttactaccatcagcttaaagcgcataacgcccgctacatcgagcgctaccaggacaacccgatctttaccgcattcgccaaggataaaacgttctccgaggcgaaaaaatccttgttcctggactacctgcagatcctgtccgatcagttccaaaaaatggtgctgctgcgtagcgcactgtgtgaagacgttcgcttctcgcgtttcttcagtgaacatctgaaagaagaattcggccatgacgaggtgctgcgcaacagccgcgacaacctccaggttcgcgaagacgcgatctttgaagcactgtgcatctggttcaaccatcagatgatcacgctggataatctggaacaggctatcctggtgcactttgtcatcgaaggttcggctttcgtgttctataacaacatcaaacacgtgttcgatccgagcaaacagaaccatttcgaggatcactccgaattcgatggcgatcatcaggaagtggataaagcgttcttcaaggggatgaccgaagaacaattccagcgtgtcaaagccgtactcgataaagggtggagtatggttgagaagcagtatgcaagactggccgaactgatcgaagcataagacgggcaggtcatcaggagcggtcatgaaaattgttttattgggattcggcggcattgggcaagagacgctaaacgcgctgttaagtacgaccgagcgacgtggcagcgtcaatgaagtcgtgatcatctgccgaaataccgaaaagtattcagccgtttgcgaagatattcttgatggcctgctggcggaagcgctcttctcacgccataaccgaacgtctttacccaagattgttgtaacggatgactaccgccacatcgacggggctgacgtgatcctctgttgctatggcgtgccttcaacctttccgatgcatgaccgccaggcgttgctggacgatcacgtacggctcagcgaggccatttttagccgagccaaacccttcattgctcccggctgtcacatcatcaatgcggtcaatccggtggatagcatcagctattacatcgataaaatcctgctcgactctcgctgccgggtgataggcatcggcgccgcgcacaacaccgccaggctgctgaaaagcatctgccgcatttccgggatcgacatgcagcgcatcgacgcgcgtagcctgacagtctgcggcgagcacggcgccgggttggtgcccttgctcagccaggtaacaaccgacgagggaccgctgaaccagctactttcggcgcaggcgctggcgcaaatcgtcaccgatacccgcaatcaagggttggacatatttcacaaaatgcggcgccctcctaaatatggcccggccgcctccattcttatcttgcttgagcgcatcatccaacgggacgaaaccccctgctgcggttcggtctggctgccggaactgggcgtgttcatgtcctggccgctggctctgcgcgacggcgtctttacgccgctgtcgctgatgcccaatcaggatgagcaacaacaaatccaccaggcggcgctcaagttaaaaaacatcatccaaggttttagctgatgacgaccgatcaaaccagacagattttccgcgatctctacatgccgttacgccctgagtatcgttttctttcgccactgtacggggtgctgtggtgcaacaacgaactcgcggaaaagtattaccgttttcttggcgccgaacacccgatcggccaggtggcgcgcgcgttgttctaccgtactgacctggtcgagtttgacgtaagcaaagaggtgaagaatccgttcacctggttttccccctctacccttgcacggctggtggctttcatgagcagcccgcgtttcaccgacaatgatatcgcctcgttatatcagcatgtacgagatgaaacggactttcacgctgccattgagcagcaacatcggctttctgtgcaaatacgccggctttgcgacagcgtactgcaacagttcgaggacacaaaagcgcagatcgcagccgcagaacgcgaagcgctctccctaggcgcccatttgaaagcgcaagaaaaagcgctgaatcagatcctgcaacaggcggaaaacgccgttaaagcgcagcaggtgccgatccaacaatgtcgagccgcgatcgccgcgctcaaagccggcaaaaaaacgctgggcaaaagcgctgctgagaataaagaggcgcagctgctggcgctcaatgccgaaatcaccgagctggaagcacgcctgaatgcggcgcagcaagaagccgtgcatcaagccggcctattccccgcctggcaaaacgcgcaggccgccgtcgaacatgcccgccagcaaaaagatgaagccaccttgcgcgccagcatgctggcggaaaattttaccgaaagcaccgtcgcacggctgcaaaccgagggattcagcgctgacttcattgcattgcatctgcctttcaacaagtatcaccgctatctgccgcgacgtgtgcaggattacgtcggtatccactgtgccgatcgcgacagcttgctggccaagttgcacaatttatgtcgtttactgatcgcggccagccgcaccgccgagcacgacagagaggtgtttcatttgctcaacgcggcgctgtggctgaaatgcaagggtaacttcggcaaattgaccgcctacatgcagcaactgcgggaactgagcggggagctgttcggcgaaacggcgacgggcgagacgcacttccccgatcgctgccatgactattacgatcgcgaagtgtacggccgctattttccgccgctgtgcatcaccaaaacctgccgccccgcgccggattctgacgtctcgttctcagattgcggggagagttcgctgcgcaacttcatcaatgtcctggtgaaaaaccaagcaagcgcgcagcttgacgccggaatactcaaacgcagcggcctggctgtcgatccgcgcgtcatcgcgttctatgaaaaaaaccctcgtttggaaacgatcagaagccaggaagtacataaccagtgggctgaaattgcctcatcactcaatgcgcgcgacaaccgaatcaaatacctgacgccaggtaaagacgcctattgcgagttggccgccggcggcaacaacatgcagcatatgctgcaagcgctattgggcgaagctgatatcaccaccatttgccgccgaatcgcctccgcttccggcatcgatattcgttgcgatctcagcgacttccacccggaacggcacgatctggaagacttcaccaacgttgttcgccttgaattcgacggcaaatatgtctttcactggtatttcctcaaacagcatttccgctgcgcttcggcagatctgttcaacgaagaggaaaattatgtacgccaggcactcgccatgctgaatgacgagatgaaacagggccgtctgaatcgcgaccagttccgcgcactgctcagtttccatctgaaagagaagcccgtggcgcaagtcaaaatgatattcgacagccttggcgctaccctcgtcggagatgaaatgacgttcttgatgctgggtaaattgaactccgtcgattccatgttcgaatactgcatgaacgttctggcgattccaacgctggcgcatagcgcgccagtctcggcgactgtcgccgcgattattcaaggcatcagcccgcatccggttatcttcgatcagcggaaaaatctcatcgcgaggattagagaaaccggagtgacgccgttactcactctggctaaccgatgggaaaaggaaagtttggaaaaggtgtaatacactcggttcaacagacgacgagcaacatttaaggagaaaccgccttgaggtcaacattcatcccttatttcccaaaagaaatatgggttatctttatcgggacgtttttgacgcgcgcctgctttttcatgatttggccattcattaccattctcatgagaaataactacgcgatgacgccggtggaaatcggcgtcatgatgagcgtatcacttatcgtgtctatttctttcggctatctcttcggtggcgcatcagacaaatatggccgtcgcacgttgattattcttggtgcaatcgccgctatcatttcatttagcgtacttgcgttggccaactcaccggcgtggtattttgtcggtattttactcaatggcatttcgcgctcattgatcgaacccgccagcaaagcggtgatcggcgatattctccatgacaggcaagagcgagaacgcgcgttgaacatccgctacttcctgatgaacgtgggcgcagccgtaggcccattagtgggtgtcgctctcgggctgacggcgcagaaggctaccttcttcgtcaccgcattgtcgttcctttgctatttgctgctggtgctcgcggtattcaaagcggggcacggtaaagaaacgcgcaacgccaccttctcattcattggctctttgcggattatctggaacgatcaggcgttcaaggtgttggtagtcgccaacattttggtgatgctggtctacgggcagatcgacgtgacgctgccgcaatacctcatgatcagccaggtgtacaaccccgaatacctgctcagcgtgctgatattcatcaatgcagccacggtgataacgctgcagtatttcaccgagcgctttacccgccgcatgtcattggcactgaaaaccagcctgggcgtgttctttctcgcgctttcacaaattgtcttcctgctggtttccagtgaaagctggctgctgtggttggtcgccatgttcctgctcagcctcggcgaagtcatcctgttccctacgctcaatatacaaattgatcgtatggcgccggctaacctaaaaggggcttacttcggtgccgccacgttttacgaatttggcctggcgctcgccccttttgtcggcggtttgctgttaaaacaaggtggcggtggcgccctgtatgccgtgatgttctttttatgcatcggcgtcatcgttctttatactatttcggaaagaatatctgagaaaagaacgataaccgcgtgacattgttaacccgctaattaacgccgcccttgtttaaacgtattaacggggcggttttatcgtgatattaatcacagtaaataaatagcgaaggatatgcaggtcattatttaatcgaatgatttatttaatgctaaaaaataaaataaatctatttacatgaatgattaggagatgttataaatttgtttattgcaggcgtgtagctcagtggtagagcgctgtgtcatacttcacagaggtcacctggttcgattccggttgcgccaaccaatataaaacccattccttttcccattctctttaattattttctcatcgaaataaaccggtaaaaatttatatatttacccccctcttttctttccatcgccccgttgcgttcaccggaaaggtgaataatttattagccaaacgccgcacattccgtacaatcctgttccttcatctgttcttgtcacaagccatcatcgtaaacctatgggggacactgatggacaaacgctttattcaggcgcaccgcgaagcgcgctgggcgctggggctgacgctgctctacctgctggcctgggggctggcggcctacctgccggacagcgccatcggcgtcaccggcctgccgcactggttcgaaatggcctgcctgctggtgccgctgctgttcatcggcctgtgctggctgatggtgcgcacggtgttccgcgacatttcgctggaggaccgcgatgcaaactgaagtgatcctgccgctggtcgcctacctgttgctggtgttcggcctgtcggtgtacgcctatcggcgccgccagaacggaaacttcctcagcgaatatttcctcggcaaccgctcgatgggcggctttgtgctggcgatgaccctgaccgccacctacatcagcgccagttcgtttatcggcgggcctggagccgcctacaaatacggcctgggctgggtgctgctggcgatgatccaactgccggcggtgtggctgtcgctcggcgtgctgggcaagaaattcgccatcctggcgcggcgctacaacgccattactctcaatgacatgctgtatggccgctaccaaagccgcctgctggtgtggctggccagcctcagcctgctggtggcgttcctcggcgccatgacggtgcagttcatcggcggcgcacgcctgctggagaccgccgccggcattccttacgacaccggcctgttgatcttcggcatcagcatcgcgctgtacaccgccttcggcggcttccgcgccagcgtgctgaacgacgccatgcaggggctggtgatgctgctcggcaccgtgctgctgctggtggcagtgatccatgccgccggcggactggacagcgcagtgagcaaactgcagcagatcgatccggcgctggtgtcgccgcagggcggcgatcagatcctcagcctgccgtttatggcgtcattctggatcctggtgtgcttcggggtgatcggcctgccacacaccgccgtgcgctgcatctcctacaaggacagcaaggcggtgcatcgcggcattttgctcggcaccgtggtggtggcggtgctgatgttcggcatgcacctggccggcgcgctcggccgcgcggtgttgccggatctcaagatccccgaccaggtgatcccgacgctgatgatcaccgtgctgccgccgtacgccgccgggatctttttggcggcgccgatggcggcgatcatgtcgaccatcaacgcccagttgctgcaatcctccgccaccatcatcaaggatctctaccttggcgtgcgtccgcagcagatccacaacgagcggctgatcaagcgcttctccagcctgaccacgctgatcctcggcctgctggtgctgctggcggcctggcgcccgcctgagatgatcatctggctcaacctgctggctttcggcgggctggaggcggtcttcctgtggccgctggtgctgggcctgtattgggaacgcgccaatgctcagggagcgcttagctcaatggtgtcgggtgcggtatgctatacgctattggccagcttcaacctgcaaccggcggggctgcatcctatcgtgccttcgctgttgctcagcctgttggcgttttatctcggtaacgtcgtcggcgaaaagcgccgggcggcgtcatcattaccctcttgaagagaattgctatgccttggatccaactcaaactgaacaccaccggcagccaggcggaagacctgagcgacgcgctggtggaaagcggcgccgtgtcggtgaccttccaggacacccacgataacccggtgttcgagccgctgccgggtgaaaccctgctgtggggcgataccgatgtgatcggcctgtacgacgcggaaaccgatatgaccgaggtggtggcgatgctggaacagcacccgctgctgggcgccggtttccgccacaagatagagcagctggaagacaaggactgggagcgcgaatggatggacaacttccacccgatgcgcttcggcgagcgcttgtggatctgcccgagctggcgcgacgtgccggatcccgacgcggtcaacgtgatgctcgatccgggcctggcgttcggcaccggcacccacccgaccaccgcgctgtgtctgcagtggctggacggcctcgatctggccggcaaaaccgtcatcgatttcggctgcggttccggcatcctggcgatcgccgcgctgaagctgggtgcagcgcgcgctatcggcatcgacatcgatccccaggccattcaggccagccgcgacaacgcgcagcgtaacggcgtctcagagcgtctggagctgtatctgccgaaagaccagccggcggatctgctggcggacgtggtggtcgccaacatcctcgccggcccgctgcgcgaactggcgccgctgatcggttgcctgccgaaggccggcggtcatttggggctgtccggcgtgctggccagccaggcgagcagcgttgcacaagcctacgaagagaagttcacgctcgatccggtcgccgagcgtgaagagtggtgccgcatcaccggccgccgtaagtaagcgtcacggtatattgctccctcatccaccggccccgcgccggtggattttttttgtccggcgatcgacccacgggcaagacaaaattttatgcaattttttgcctttcaacgatggatcgccctgacaatgcgccttccagacaggttatcccggcaaaaatagcgggcgaatgcagataatatcctgcgcaaaggcgaatattttaccgcacacaaaataagcacttttcgtcaactcattgtaaaatatatacaatatttttatgaatcactgcgcagcgcattttttgccctaatagcgagccaattggttaaagtttggcctttcatctcggcgcaaaaatgcgtaatatacgcgcccttgcggacacagtatggtcactctttgtctatgcgcattggacaccaccagcttactaattgcctgattgcggccccgatggccggtattacagatcgcccgttcagaaccctctgtcatgcaatgggtgctgggatggctgtatccgaaatgctctcctccaacccggaggtgtggcggacggataagtcgcgtctgcgtatggtgcatagcgatgaaccagggatccgctccgtgcagattgccggatgcgatcctgatgatatggccgccgccgcgcgtatcaacgtggccagcggcgcgcagatcatcgacatcaatatgggatgcccggccaaaaaagtgaaccggaagcttgccgggtccgccttgttgcagtacccggatctggtaaaacggatcctccacgcggtggttgacgcggtggatgtgccggtaacgctgaagattcgcaccggctgggcgccagagcaccgtaactgtgtagagattgcccaactggccgaagactgtggtattcaggccctgacgattcacggccgaacccgcgcctgtctgtttaacggcgacgcggaatacgacagcattcgggcagttaagcagagtgtttccattccgattatcgcgaatggggatattactgacccgcataaagccagagcagtgctcgactacaccggggctgatgccctgatgataggccgcgctgctcaggggagaccctggatcttccgggaaatccagcattatctggacactggggagttgctgccgccgctgccgcttggcgaggtgaagcgcttgttgattgggcacattcgggaattgcacggcttctatggccaaggcaagggattccggattgctcgtaagcacgtgtcctggtatctccaggaacacgctccgaatgaccagtttcggcgcacattcaacgccatagaggatgccagcgaacagctggaggcgttggaggcatatttcgaaaatcttagcgtaaaaaaagagctgacagaactatgttcgaacaacgcgtaaattctgacgtactgaccgtttctaccgttaactcacaagatcaggtgactcaaaagcctctgcgtgactcggttaaacaagcactgaagaactattttgctcaactgaacggtcaagacgtaaatgacctgtatgagctggtactggctgaagttgaacagccactgttggacatggtgatgcaatacacccgtggcaaccagacccgcgcagccctgatgatgggcatcaaccgcggcacgctgcgcaagaagctgaaaaaatacggcatgaactgatactagtcagttaacgtgttgaaaaggcgctttatctcatttgataagcgcctttttcttttgagtaatctcatttccaagcgtactatccttcctcatctcattactgctcatcttacaaatggtattctggcaaccgcgttcaaagcaggatgcttgccaatcctcaaataagttaaagaacaataatcaaactcaataataattaatataattaattgttttaaaaggaaattaaattggaaaacaaacatactacagcagaagatttcgacgacagcagcttctggaataaaatcatgcgttacgcaaagaaagcaggaagcgaggtgattgagaaagcactttggctttactttgccgctcaacgtcctaataccccactgtgggccaaaacagctatctacggggcgttggcgtattttgtattgccaattgatgcgatccctgatgtcgtgcctgtggtgggatacacggacgatctgggtgtactcgctaccgctttagcttctgttggcatgcatatcgacgacgaagtaaaaaatgatacaaaggaaaaaatggctgattggtttgatgcaaaataatcatgacaatcaggcatatatgtcctagtaaaaaagcgttagctgatacccgtagttaacgtgttgaaaaggcgctttatctcatttgataagcgcctttttctttggggcacgcccgatttgcaggcaataaaaaaggccgcagcgcggcccttggggtaaagcggagaccttactcggtcactttgttcttgaggctttccgccccttgcttggtcttgtcccaagccttctccgatccctgtttggtggagtgccaggccttttgcgaaccttcgctcactttgctgccgacgctgtcgctcttgccttcggcggcatgcttggctttcagcttcagctcttcacccttgtcctgagactggtgcagcttttctttggcggtatccgcccctttgtgcgcctcggcgacaacttcgttgctggcgtgagcggcggtgtcggtcgcggtttcagcagcgaacaccggggaagcgagcagcagtgcagacaaggcaatgattgattttttcataagtccctcttttctcagatacgtgccattcgtcatgaaacaagatggcatgaaacaccccttgaacgatttaagaataggactaaaaccaaaaaaatcgatataaaatttcattacaaatcattttattgattttttatgccaacaagcagcacacgcagggaaagcgcacgaaaaagttaaatttttcctgtcataaaactataatttgtacgaatttttaacaagctccaacagggatggattctatggttgccgcgatcattatcggcatttttatcatcagcttcctctacgcacactcccgcggcaaagagaaacaaaagcttacccgtcagctgttcgatcactccacgtttatggggccgatcaacatgtttatgaccggtttctcgcgtttgcccgccaaacagccctatttcgacgaaaaaggcttcccggagctgcaaacgctgaccgacaactggcaggtgatccgcgaggaagccgtgcgtttgcaggatcacatcaaaaaggcgcagtcgcacaacgacgccggcttcaacaccttcttcaaacgcggctggaaacgtttctatctgaaatggtacagcgacagccacccttcggcgcaaacgctgtgcccgaaaaccgtcgagctgctcaaccgcatcccatcggtcaaggcggcgatgttcgccgagctgccgcccggcagccatttgggtaaacaccgcgatccttacgccggctcggtgcgctaccacctggggctgatgacgcctaacgacgatcgctgcttcatcgaagtggacggcgagcagcacagctggcgcgacggccaagcggtgatcttcgacgaaacctacgtgcactgggcgcaaaacgccaccgaccagacgcgcatcattctgttttgcgacgtcgagcggccaatgaaatggcgctgggcgcaggcggtcaaccactgggtcggcgctacgctgatgtcggcggccagttcgccgaacgacgatcaggaccgcaccggcggcatcaaccgcatcttcaaatacgtcaacgcggtgcgcgacgccggccagcgcctgaaggcgcgtaatcgccgcggttactacctgctgaaatggctggtgatcgccgccattttcgccgccatcatcctccccagcctgtaaaccgtcgccaatcgtcaatccagaggcaatgcgaatgagaatattcgcatgcctctcttcctctgaaccccgtaccctgtgttaacatacgcattcctagagccgcctccgctggccaacagctatccctccgaagcctgatagcagcgcaaaccgcccttcgaatgtaaatgtttagtcaattatggaattctgactaaaccctggccgtccccgggtgtctgagtcgttgtatcgctatcgagtggatcctttatgcgctacaggttgctacccccctaacgcataaacgagctgctatgaaacgccaaaagagatttcaactttccttgctgcacccgcgctactggctgacctggttcggtctggccctgttgttcctgctggtgcaactcccctacccgctgcttaaccgccttggcgtatggatggggcgcacctcgatgcgctttcttaagcgtcgcgtcgccatcacccgtcgcaacctcgaactgtgcttccccgagatggacgaagcgcagcgcgagcgtaaagtagtgggcaactttgagtccctcggcatgggcctgctggaaaccggcatggcctggttctggtcggataaacgcgttaagcgctggtttaacgtctccggcatcaaccacctcaaaatggcgcagcgtgacgaccgcggcgtgctggtgatcggcgtgcactttatgtcgcttgagctgggcggccgggcaatgggcctgtgccagccgatgatggcgatgtaccgcccgcacaacaacaaggcgatggagtgggcgcaaaccaagggccgcatgcgctccaacaaggcgatgatcgatcgcaaggatctgcgcggcatggtgcacgcactcaagcgcggtgaggcggtctggttcgcgccggatcaagattacggcccgcgcggcagcgtattcgcgccgctgttcgccgtcgatcaggccgccaccaccagcggcaccttcatgctggcgcgcatggccaacccggcgctggtgccggtggtgctgatccgccgtgaaggcggccgcggctacgacctgctgatccagccggccctggaagactacccgctcagcgacgaacaggcggcggcggcttatatgaacaaagtgatcgaaaaagagatcatgcgggcgccggagcaatatctgtggctgcatcgccgcttcaaaacccggccggtcggcgcgccgtcgctgtactgagccccattttccagcccggccgacgccgggcttttttgtgcgccgcgtttaaaaaatctgcggctcaacatttcgctttcctgtaatctccctctttacccgcacaggaaaggaaatgatgaaagctcaagtccgcattgctctggtcggtgattacaacccgcaagccgtggcccatcaggccatccccgtggcgctccagctcaccgccgcccatctcgacatcgacgtgcagccccagtggctaccgaccgaaaccctgacctcccccgatgtcctgcaagatttcgatgccatctgggtggtgccaggcagcccatattgtcacgacgacggcgcctttatggcgatcaggcatgcgcgggaaaacgacgtgccgttcctcggttcctgcggcggctttcagtacgccatcatcgagtacgcccgcaacgtgatgggctggcacgatgccggccatgcggaaaccgacagcggtggccggttggtgatcgccccactgagctgctcgctggtggaaaaaaccggcgacatcgtttttcagcctgacacccgtgtcgcgcaggcctacggcagcctgaacccccatgaaggctaccactgcaactttggcgtggctccggacttcgtcgccgaccttgagcgcttcccgctgattatcagcggccacgatgccgaaggcgacgtgcgcgccatcgaactgccggagcggcgtttttacgtcgccacgctgttccaatcagaacgcgctgcactgcgcggcgagctttcgccgctggtggtggaattcgtcaaagccgccgtctgctaacctgctacctccccgtaggatcgagccgcagcgagacagggttctcgttgcgtctttcatttcgggtatcactcggcatcaacgtttcacatttattatctcattaaagttaatccattaattgcccaataacggatcattcatcgcagtttaattgaaacgtcatactcctatgaaagttaacagcagaattacgaataaagaaatgcatgaaatcacaataagcttcacttcttattattcattattatttcttttataataatacaacataagagattctttataattttttatgattcagcctgttatctcttgcagagaagcaaccgaacttgcccgctgagataccactccgttatcgcttacgaaccgcctcagctccgccccccttttgccaaaaataaaaaataacaaataaaacaataaattacatgatttcgcttactaatatcacgaataaaagccagtcaatcgtgattaacacgccacaaaagcaatggcaaaaaaccagtttaaaaataaataaaatacaaatcattaacgctaaaatcattgcatttattataataaaataaaaccattaaaaatatttaatgtgaaaacaggccaacttaataatcaccttttataatgttcgagtgcttggctgcgactcactttatttaattcgattcattccttatttgtggaggtggttccgtgtccgcttattccctgacgaccgtgcaacaagccgtgtggctagaccaatctttaaaccccgatatccccttatataacgttgggtgtttatggcgcgtagagcgcgagatttcgctaccgctgtttcaagaagccatacggcaaatacagcaacaacatgatgcgttgcaaaccacgctgaaagaaacgccgcaaggcattacccaggaaacctgcgaccgggcctatatcgacctgcattaccacgatttttcgcatagacaagatgccatcagcctggcagaaacacaccttcgttctcaattcctgcagccttattcactgtatgacagcctgctttggcgctgccacctggccaaagtcagcggatccagcacgctatggctgcttgcttcccatcacctgatcgcggacggcacctcaatttccctgctgagcaaaatgatcatggagcgctataaacaattaaaagcagggataaaaaacgaagccccccactcgcgttaccaagacttcgtcatcagcgatcgcacctatcagcagtctccacgctacgagcgcgatcgtgatttctggttgaagcgtttcatcgacgcgcccccctccatgctggaacgccgccaaaatcactgtgggcaacaaacctaccccagccatcagataatcaagcggttgccacgcgagcgtttcctacagttggaacaatacgccgccgcgcagggcggttctgcaatgcatttttttagcgctttgctggccacctggttcgcccggatttggcaaaccgatcaattcacgctgggcgtgccggtacataaccgcagtaccgccgaacataagcaaacattgggcatgttttcctcgatgatcccactgcgcatcacggtcgattcacagcaatccttcggccacttactgcggcaaatcggcagcgagctgcgccagtgttatcgtcaccagcgttttcccattgccgaactcaaccgccagttgaacctgcatcagcaggagcggcgccagctgttcgacatcagcttttctctggaggtttttccgaccgacatcgaactggaaggcagccagttcaaggtggaaaacctgcaccacggtcaggaacagctgcccctcggcgtctacctgcgccattaccatccgggcgacgatccgctgttggagttcaacttcaatcaggcctggttcagtcaggaagacggtgagcgcatcgccgcccgcatgctgcacctgctgaacacgctactggacggcgatccggcgctgccgctggggcagttaccgctgctgttgccgcaggaaagacagcaaatcttccatcaatggaatgaaacccgacaaacatgggcagacatgccgcaaggcgtacatcaattcctggaacggcaggccgcgctgacgccagaagcgccggcgctgtgctacggggaccacgagatcagttatcaacagctgaatcagcgggcgaatcgattggctgcctttctcaggctgcagggattacagcctgacgatcgcatcgcggtatgcgtcaaccgcagcccggatatggtgattgccctgtacgccatcctgaaggcgggcgccgcctatgtaccgctcgatcccgactatccacaagaccgcctgcgccacatgctgcaagattgcagcgccagattcgttctgatcgacgatggcggcgaacacgcgctgcacccgctgcgcgatatcgccgtgccgcgattgcatcttcaacgtgagagccatctgtggcggcaagcgccggatggcaacccgccgccgctggccgccgatccacagcgcagcctggcttatgtgatttacacctccggctcgacggggaaacccaaaggggtgatgaacgaacaccgcggggtgatcaaccgactcctgtggatgcaaaaggcttatacactgacgccggatgatgtcgtgctgcagaaaaccccgttcagcttcgacgtctctgtctgggagtttttctggccgatgatggtcggcgcccggctggccatcgccaaaccgggcggtcaccaggaaccggattatctcagcgcctgcatcgcgcagcacggcgtgaccacactgcatttcgtcccctcgatgctgcaactgtttctgcgccacggcgatatggcgcagtgtgcctctctgaaacgcattatgtgcagcggcgaggcgttgccgctcgcgacggtacaacgctgcctgcagcagttgccgcaggcggaactgcacaatctctacggcccgacggaagccgccgtagacgtttccagctggcaatgcctgcccgatgatcctcgcccactggtaccgatcggtaaaccgatcgccaatacccagctccatattctggatgaccaactgcaaccgttaccgcccggcatcgccggcgaattgcatatcggtggtattcaggttgcccgtggttatctgaaccgcgcggcgctgagcgccgagcgatttatcgccgatcctttcagcgccgagccgcaggctcgcctgtataaaaccggcgatctggcccgctggctgccggatggcaacattgagtatctgggcagaaacgatttccaggtcaaaatccacggcctgcgcattgaattaggcgagatcgagcaacagctcagacagtgttcgggggttgaagacgccgccattctggcacgggaagacgaaagcggcggcaagcgcctggtcgcctatgtcatcgccccagagcaaacggccgacgccgccgaatggcgtcggcaattgcagcaacacctgccggactttatggtgccgtcctgttttatccggctggatgcttttccgctgtcgcccaacggcaagctggatcgcaaagcgttaccggcaccagccaacatgcaggaaaccgctgcttatgaagccccgcaaggcgagcaggaacagcagttggccgaactgtggagcgaactgctgggcacaacgcgcattggccgcgacgatgatttcttcgcgctgggcggccattcgctgcacgccattcaactgctggttaaactgaagcgacacgggcattcgttaggcattaaaacgctgtttgctcactcgacgctgcgcggccaggcccgtattctcaccgacggcgtgcccgcaacggctccagccacctccgaacccctgcagcagctgttgacccgtctgaatcaggccagttttacctttaaacaggtagagcgcctgaaccacgccatcacccccgacagcgtttggatgatccatcctgccgtcaccggttgcgatgtttatcgcgatctggcgaactatttagagaaagatttcaatgtgttaggcatcaacaattacaacctgttccaacagccgcacatcacttcgctacgcgagctggcggcgtattatctcggccatatgcggctgtcgccggcgcgccccgtccgtctgttgggttggtcgctagggggcctgatcgcgctggagatggccgctcaactggaaagccagggctatcgcgatatccaactgttcctgcttgataccttctaccgaaccccattccagatccgcagcgagccgggcatgctggcggcgatgctggccatgttgggtattgacggcgaggccgccgaccgggccttaaaggcagagccgacggagctggcattggcaaaacaaacgctcagcgcaccgttgcaacatgcacgcatcacgctgttcaaggcgaccgaagatgcaaatctgaatatcaccggcctgggcgatgagcgtgaactgctggcgattgccgacaatggcctgtcggcaatcggtcaacatctgcaggtgcatccgttgccctgcaatcatcactccattatcttcagccacgaggagataggacacgccttgcgacagtcatcgcgcacgccggcgatgctcggcaaccttccttgacgctctacggtctgcggcgccgttcgccgcagaccgcctcctcaccacatcagccggccgatcagtggcgcggccaccaccgtgataatgccggccaacatcatcaccaggctcgacactacgccctcctgcggccccagttcataggcgcgggcggtgccggcgccgtgcgacgatgcgccaaatccggcccctttcgccaggcggctgcgtacagccagccgcaaaaacagaatgtcgcccaccgccatgccgaacaccccggtgatcaccacgaacaacgccaccaggtccggttggccccccatctgcttggcggcctccagcgcgaacggcgtggtgatcgaccgcaccgccaggctgcgctgcacctcttccggcagcgtcagcaggcgcgccagccacaccgagctgtacactgccaccagcactgcggtcgttaccccggcgctcagcgacagccagtggcgacggatgatatgcaggttctcgtacaccggcaccgcgaaggcgatggtcgccggccccagcagccacagcagccagtgggtttcaccgatgtagtcctgataggagatgtgggtgaccaccagcagcaacaccagaatcatcggcgtcagcaccagcggcatcagcagcaacgtgcggcggcggcgatagagtttcttgttggcgaaatagagcgccagcgtcgccagaaaacaggccaggctaaggataaaatcattcatggcgctgcttccgccgctgcagccaaatctccagccgatacaccctgtccaccaccagcccggtggcgcccagcgtcagcatggtgctgactgcgatcaccagaaagatcttccagccctcgaccatcagcagctgggcatagttgaccaccgccaccaccgccggcacgaaaaacagcagcatttccgccagcagccagcgggagccggccttgacccagctcagcggcagaatgcgcagcaggatcagcgccagtagcatcagcatgccgacgatattggcggggagcggcaggtggaattgttgcaccaggcgatcggcgatcaggaacagcgccgcatacaacgccacctgaatcggcacctgcaaacgggtcagcagggagggggcaacgcggcgtaacgccagagacatgaaagatgacctcaaacaataattgacggcctacagtatacgcagccgggaaaccacgcctgaaatgaattaaaattatcgacatcatgccgtccgggaatagtttctcgccggtagcgtccccaaggagaaccctaacgtggatgtccgcaccctgcgctacttcgttgaagtggtgcgccagcaaagcttcacccgcgcggcggaaaaactgttcgtcacccagcccaccatcagcaaaatgctgcggcatctggaggaagagctggaatgcacgctgctgatccgcgaaggccgcaagctgcgcctgaccgacagcggccaggcggtgtaccagcgcggcctgacgatcctcgacgagttccgccagttggaggcggagctggaagacatcagctcggtgaaaaagggcgtgctgcggctgggcattccgccgatggtcggcaggcagatcgccgatctgatccgccgctttcgccagacctaccccggcatcgaattaaagatttccgagctgggcgggctgtcggtcgaacaggcggtgatgtccggtgaactggatctggcgatgacggtgctgcccttcgattcggcgcagccgctgacctttctgccgctgctgggccatccgatgtgcgtggtggcgccgcgcacgccgcagtggctcaaccgcaccagcatcaatatcgccgaattggccgacagcccgatcctgatttataacgaagactttgcgctgtacaagatgctgatgaaggcgtttcgcctggccggctttgaaccgcaaatcgcggtgcgcagcggccaatgggactttctcgcctcgatggtgcaggccggcgtgggcatcgccatgctgccggagccggtttgtcgctggctggacaaggaaaacctggtctggctgccgctggagccgcgcatggagtggaaaatcggcctgatctggcgccagggcagctacctgtcgcacagcgcgcaggcctggatcgcctgctgccgcgactactggccgccgctcaagtaaccaaaaaaagggccgcacaggcggcccttcaggacagaaataaagaggaaaacgtttattcctcttctgagatttacccttcgcgttcgatcagcagcgcttcgagcaggtcgagatcgtgcagcagtttttgcagcgtctcgttgctgattttctgcgtggcgcgcaggtgatacagctcgccgcgctcggcgcgcagcgccgtcaggcggaaacgtcgctcgaggttttccatcgccagcgcattctcgatatcgtctttcgacgcgatgcgccgccgcagcatgcccgtcacccgcgagctgacctctttcaacacctgcggatcgaggttttcttcggtatcggcaaccaggcgctcttccattttattcacgctctcaatcgccacttcggccgccatggcgatcgccatgcgctcttcctgcttgctggcgctcttgtcggtgacctgcacgccgcgcagcagcagcggcaacgccagcacgccgacgatcaacgacagcaggatcaccccggcggcgataaacaccagctgatagcgcgccgggaaggcggtgccgtcgctcagcaacagcggtatagacagcacaccggccagggtaatcgccccgcgcaccccggcgaacgacgccacccacagctcacgcgtgctgtaatcgccgaactgcagcggacgctttttcataaagcggttgctggccttcttcatcacccacagccaggtgaaacgcagcaccaacagcgcggcgtagatggtggccacgtcggcgaacaggtaccaggtctggatggtcggatccagctccgcctgcaggatggaggtttcaagaatgcccggcagctgcaggcccaacatgatgaacaccatgccgttgaacacgaattccagcatcgcccacacgctgttggcgcgcaggcgcatcgccagcggcgcgttgcggatcacgccggactggctgatggtcatccccgccgccaccgccgccaggatgccggaaacgccgatatgttcggcgatcaggtaggacgcgaacggcagcagcagcaggaacacgatctgggtcgccggatcgtcgccgctccagcggctcatcacccgcagcgatttactgtaggtccaggtgaccgccacgccggccagcaggccgccgatcgccactttgaggaattcaagggtcgcgccgcccacggtgaacaccatggtgcccatcgccaccgcgatggcgaacttgagcgacaccaggccggaggcgtcgttcatcagcgcctcgccctcgagcacgcccatgatcggcttggggatccgccctttgccgacgatgccggacagcgccacggcatccgtcggcgacagcaccgccgccagagcgaaggccgccaccagcggaatgcccggcaccatggcgtagatcagataaccgacgccgaccacggtgatcagcaccagcaccagcgccaggccgagaatttcacgcccgtgatgcaggaattcgcgcgtcggcgttttccagccgtcggcaaacagcagcggcgggatgaacagcaccaggaacagttcgggatcaaaatcgacgtgcagcccgaaatgcggccaggccagcagggcgccgatggcgatttgcatcagcggcagcggcacctggaacggcaacatgcgcgtcaccaccccggacagggagaccaccaggatcaaaatgaggattgtaaaaaagatttccatgctttccttagactctacgattcagacgacatcggctcagggcctgcgttggtcacgatagtagatcactttttttacagccgttaaagcttgttgtgcctttcaaaacgcggtgcagagcagaagaagacttatcttaagaagggaattgccgtaacaggctcccccgcccggcgggcgagggaaacccaagcggcttaaatcgcccagccgccggcgtagaacgccaccagcgccacggcgatcagcacggtgccaatgttcagcttgcgccattcgccggagaagatgcggccgatgaccagcgagctgaagcccagcatgatgccggtgacgatgttgcaggtcagcacgatgaacacggcgcacagcaggccggccatcgcgtcgacgaagtcgttgaagtccagcttggtgacattgctcagcatcagcaggccgacgtacatcagcgccggcgcggtggcgtaaaccggcaccagataggccagcggcgacaggaacaggatcagcaggaacagaatgccgaccacggtggcggtcaggccggtcttgccgcccgcggcggtgccggcggcggactcgatgtaaaccgcagcgggcgcggcgcccaccaggccggagaagatgctgctcagggaatccgaggtcagcgccttgccgccgttgatgatctgcccgtctttatccagcaggttggcctgcccggccaccgcgcggatggtgccggtggcgtcgaacaccgcggtcatcaccagcgccagcacgctcggcaacaccaccggctgcaatgcgcccatgatatccaggctgaagatcaacgatttgccgtcagcgtccgccaggctcggcatggcgaacagcccctggtatttcaccgccgggtcgaagatcaggccgatgatggaaatggcgatgatcaccagcagaatgccgccgggcacgcgcagtttctccaggccgaagatcaccgccaggccgaccagcgtcatgacgaccgggaaagaggtgaacgcgccgagcgccaccggcaagccatccagcgggttcttcaccaccaggccgacgccgttggcggcgatcagcagcagaaacagcccgatgccgatgccggtgccgtgcgccacgcccatcggcaggttgcgcaggatccaagcgcggatgccggtgaccgagataatggtaaacagcacgcccatcaggaacaccgcgcccagcgccaccggaatgctgatgtgctggcccagcaccaggctgaaggcggtaaaggcggtcaacgagatcgcacagccgatggccatcggcaggttagcccacagccccatcagcagcgaccccagacctgccaccaggcaggtggagacaaacaccgccgccggcgggaaacccgctttgcccagcatgctcggcaccacgatcaccgagtacaccatcgccaggaaggtggtcagccccgccaccacctcctgacgcacgctgctgccgcgcgcggaaattttaaaatagccatcaagcccgccggttggttttgcggcgtggttcgcttgagagttcgacataggttacttcccctgtgtttcatgaatcggcccgtcacagcaggcctgtaatctcgcccgcgcccgatcgccacgtaatcgtttacgtcacgttccgcatccctgcccttatgccacaccgccaacggcgatgcgcacccaggcaaacgtttaactcgcagcgcgcggtacgggtgatttatggtggtttattcaaggcaaacgattatcctgccttccctagcgtctaatcaactaaagatcgcggcaatttatgcagaaaacggcgggaatagcttctgcgcgaaaagacggggcgatccggcgcccctgccgacctgcttcacggcgagcttattgcgcctgcaccgccgcgggatccatatacatcaattcccagatatggccgtccaggtcctgaaatccatggccgtacatcacgccatagtcccgcggcggatgataggtattgccgccgccggcgattgccttgcgcaccagttcgtccaccgccgcccggctgggttgcgacaggcacaccaacacttcggtggcctgtttggcgtcgccgatcgggttcggggtaaacatcctgaatttgtcgtgggtcagcagcatcacgtaaatcgtgtcgctgaccaccatgcaggcggcggtatcgtcggtaaattgcgggttgaagctgaagccgagctgggtgaaaaacgccattgaggcgggcaggtcgcgtacgggcagattgacgaagatttgcgtagccatgggctacctccgatgaagaatgaccccatcgagtatagcccatccgcctaactcagcaggtcgtaagggccgccctgctccaatgcccgctggtaggcgggccgggcgtgaatgcgctgcaggaagccgcgcagtttcgggcaatcatccaacgcgccgcgcgccgccatcgcctccagcgggaagctcatctgaatatccgccgcgctgaagtcgttgccaacgaaccaactgcccttattcaggtgctgttcgaggaattcgcagtgcggcgcgatctgcttgtcgaggtattcccgctgcacgcctttgccgatcgcgccggccaccggccgcagcagccaggggatcggcggctggccgagacggctgaacaccagcttcatcaccaacagcggcatcagcgatccttcggcgtagtgcagccagtagcggtattgctgacgcgcgtggaagtcggttggcataaacatgccctgtgcgtcgtaggcttcctgcaagtattcgataatggcgccggattccgccagtgtcagatcgccatcgacgatcaccggcgatttgcccaacgggtggatctttttcagcgccggcggcgccagcatggtgttgggatcgcgctcgtagcgttgcacctgatagggcacgcccagttcttccagaaaccacagaatgcgctgcgaccgcgagtgattgagatgatgaacgatgatcatgacgacgctcctgtccgctgccacaccagttcgccaacctgcacgccgttgccgagctgcagcggcaccgtgcgcaacgtcagccgatcggcgttaaaggcgtaaaaacgtacctgacggctgcctatccaattggggaacgagcagccttcaacctgatgcaccacccgttgctcactttcttccacctgataacggccgaagtagcaaatcatattgatgaaggcggcatggatctcccgctcggatccctgcgtcaaatcgtcggcgacaaaacgcggccgcacggcgctgtatagctgcgccgccatcgtgccgttggcctcatagtggatgcgccccaacacctgctcgcccagcgggtaattgagctcgccgttctggtttttgaacgccgacgacaccaacgcccaactgccgataaacgcattcatcgtcatgacgcttctccggttaaggatcgtctgtaaagggtagtggcgattgttgccccgcgccagcggatgaaaaataatcaatttatttgacagagatactcaaaactctccgattttttattcacatccggtgcactagtatttaacacatcgagagacaacgggctctcacctaacaaacactctgaggaacgcatcatgaaaaacatcaaaatttttgctaccgctgcgctgctggctaccgcttctttcgctaccttcgccgctgacctgccttccagccaacctgctgcagacgcccagaagatcggcgtcgtcaccgtgagcggcgccgctaacctgagcgcgctggaaagcgaactggccagcaaagccgccgcttcgggcgccagcgcctaccgcatcgtcgccgccggtggtcagaacaaactgtacggcaccgcagaaatcttcaactgatcgtcggacagccaaccgacggaagaaagaagccccgcaaggggcttttctcgttttagcgggcgtcaaagcgcgccgccaacttctgcaggcggaactgttcggtgatgaaatcgacgaacacccgggttttggtcggtaagaatttggtggtgggaaaatagagatacacgctgccgcgatcgacataccagcccggcaaaacccgcatcagacggccgctttccagataaggcgccgcattcggcatgccgatcagcgcgatgcccaatcccatttccgccgcccgcgccgccgcttccggttcattgaccgtcatgctgaccgtcatccccggcgcacgctgctcattctgggcatttcgcagcggctggtggcgaatgcgcccggtctgcggcgaacggatgaaaatcccggcgtgttgcgccagttgctccggctccgtcaacggcggccgctgccgcaagtattctgccgaagcgaccaatacgccatgcgcgggcgccagctcgcgagcaatcatcccctgcgccaactcgatgccgccgcccagcgcagcgtcaaagttctcaccgatcagatccacctggcgattgtcgaaatgccagtccggtacaatcgccgggtactgcgtcaaaaacatcggcaacatcggcaatacgaagtgcagaccaaaggcggtacccatactgaccttcagcccgccggccgccgcgccgccgccgctgctcagccctttcaatgcgcactggatcgattgcaatccgccgctcacctcgccgagaaaacgctcccccgcctcggtgaggatcagcttgcgggtattgcgctgaaacagccgcacgccaaccaccgcttccagccgggtgacattcttgctcaccgccgccgggctgaggcccagcttgcggccggcggcggagaaactgccgttttccgcgctgctgacgaagcactccagatgtcccagcatgctttttccttatggattttaaactaatggttttaactgattatagctctttgtggctagtggccgtgcaagcgatctccgatactgaatgccgacactttaccctcatccactctggagaaataacatgaccacagcactcccactgcaaggcaaagtcgcattcgttcagggcggttcccgcggcatcggcgccgccatcgttaaacgcttggcgagcgagggcgccgccgtcgcctttacctacgccgcctcagccgatcgcgccgaagcggtggcgagcgccgttaccgccgccggcggcaaagccctcgccatcaaggccgacagcgccgatgctgcggcgctgcagcaggcggttcgccaggcggtgagtcacttcggcaacctggatattctggtgaacaacgccggggtatttacgctgggcggcaccgaggaactggcgctggacgacctggatcgcatgctggcggtcaacgtacgcagcgtattcgtcgccagccaggaggcggcgcgcaacatgaacgacggcggccgtatcatccacatcggcagcaccaacgccgagcgcgtgccgttcggcggcgcggcggtgtacgcgatgagcaaatcggcgctggtcgggttgaccaagggcatggcgcgcgatctcggcccacgcggcatcaccgtcaataacgtgcagcccggcccggtggacaccgaaatgaacccggacgccggcgagttcgccgatcagctcaagcagctgatggcgatcggccgttacggcaaagatgaagaaatcgccggtttcgtcgcctacctggcgggcccgcaggcgggttatatcaccggcgccagtctgagcatcgacggcggcttctcggcgtagcgctcaaagccccgcaaggggctttttttcattagctccccgacgaccgcttctcacctcgcacggcatattcggccttgaaagacaataatagaattagtttatgcgcaaaaatggaatagtttattgacgattctgttatttattcaccagcccgacgtctttatccttcgctccatcgtgtcgtaccggacacccttatttttcgaaccttcgaacacaggataaagatatgaaaaccatgaccaccgttatttcactcgctctgttttccatgctgtcgtttaacgccgcggcagaaagcgtgaccgcaaccggcagaacactggattccaccgaagccctcatcgctaaaaaagcgcaagaagccggcgcaagcggctacaaaattaccagcgcctacatgggcaatttcgtcactatgagtgcagaactgaaaaaataatgcgtttagcgataacgccgtgcatacggcgttattcattgccgcatgattaaggaaatcatcgccgggcgcctttttaaaaatcacgctggcgtacccagtaaacagaaaaaatgagccgttccctcaccggttattattcggcggcctcacgccgccaatttccggaggctcactttcattcgccctgcaatactccgttataaggatgagtcactgatgaaatcattgtatcgcctctccctcttgctgcccttgctggccgcagtgcccgcgcacgcggcagaatccgccgcgcagtcgtcagactggtatccttccgtttacggcgcaaaagacgaaatcggcgcggccaacctgctcacgcctgaggtcgtattacagtccgtgcagttggtaaaacaaggcaagacattgccattggcggtgcccgtcgataaagatttcccggcgttccgccaccgcagcttccgcttatataatattcagcctggtcagcaggacggtaaaacgcttggcccaaataaattcacctttaatgatgaattggtgaatgcctggaccggcgtcggcactcagttgaatggcattggccatatcggcatcgacaatgtttattataacggcaataaggcggcggatttcgtcaccgtagatggcgtaaaaaaattgggcgtggaaaaagtgccgcccatggtcacacgcggcgtcgtactcgatatgacggcttattataataaagcgatcgttccgggcggcaccgaattttccgttgcggatattcaagcggtgcttaaaaagcagggcatcagtttacgcaaaggcgacgttgtcttgttcaacaccggctggctggagctgattggcaaagacaataaaaagttcctggaagttgaaccgggcatcggcatggaagcggcgaaatggttggccgaccaaggcatcgtggccttcggcggtgatacctgggcctccgaagtttaccctaacccgaaaaatgacgaagagttcccggtcaaccagtacctgctggccaaacgcggcgtctataacctggagctgatcgacagccgcccgctggtgcgcacgaaaacctgggaattcctgttcgtactggggcaaccgctgtatgtcggttcaacccaggtcaatatcaacccggtagcaatttactgactggcgacaccgccgcagaaaatcagcggctaacgaacacaaaaaaccccgcctgagcggggtttttttagcgctgttgccaggcttagaacggaatatcgtcgtcgaaatccattggtggttcgttgctggtcgccggtgcgctgttctgcgccgggcgagactgctgctggccgccgctgaactggttgccgccctgtggctgctgaggctggccccaaccgccctggccgccggcagattgaccggccggtgcgccgccgccctgacggccgcccagcatctgcatggtgccgccgacgttaaccacgatctcggtggtgtagcgatcctggccgctctgatcctgccatttacgggtctgcagggagccttcgatgtagacctgagagcctttacgcaggtattcacccgccacttcggccagtttgccgaacagcacgacgcggtgccactcggtcttctctttctgttcgccggtcgccttgtcacgccagctttcggaggtcgccagggtaatgttggccactgcgccgccgttcggcatgtaacggacttctggatcctgacccagattcccgaccagaattactttgtttacgcctctgctggccatgagcacttctcccgatgattgatttctacacagtataaacgcgtcagtttaccacgctgagtacgaaaccacacccgtgttgataagtgcgaattgcattccagaattgtcttttcgatcgaccttgttgcattcgcatactggatattcattcaggtttttttgtgtcataattatgcgtttcgaccaggctgtgccggttttttgcgagatccatcacaaaatcccccgcaaaaatcgcgacaggcgcggtgtatcatcaagacgggaagtgtaaatggacaatatcgaagttcgtggtgctcgaacccataatctgaaaaacatcaacctgatcatcccgcgtgacaaactgatcgtcgtcaccggcctgtccggttccggcaagtcttctctggctttcgatacgctgtatgccgaagggcagcggcgctatgtcgaatcactctctgcctatgcgcgccagttcctgtcgctgatggaaaaaccggacgtcgatcatatcgaaggcctgtcgccggcgatctccatcgagcagaaatccacctcgcacaacccgcgctccacggtcggcaccattaccgagattcacgactacctgcgcctgctgttcgcccgcgtcggcgagccgcgctgcccggatcaccatgtgccgctggcggcgcagaccgtcagccagatggtcgacaacgtgctgagccagccggaaggcaagcgcctaatgctgctggcgccggtggtgaaagaccgcaagggcgagcacaccaaaacgctggaaaacctggccgcccagggctatatccgcgcgcgcatcgacggcgaagtgtgcgatctgtccgatccgccgaagctggagctgcagaagaaacacaccatcgaagtggtggtcgatcgcttcaaggtgcgcgacgacatggcgcagcgcctggccgaatcgttcgaaaccgcgctggagctgtccggcggcaccgcagtggtggcggatatggacgacgaaaaagcggacgagctgctgttctccgccaacttcgcctgcccgatctgcggctacagcatgcgcgagctggaaccgcgcctgttttccttcaacaacccggccggcgcctgcccgacctgcgacggcctgggcgtgcagcagttcttcgatccggatcgcgtggtgcaaaaccccgagctgtcgctggccggcggcgcgatccgcggctgggatcgccgcaacttctattacttccagatgctgcgctcgctggcggagcactatgagttcgacgtcgaagcgccattcaacaccctgagcgccaacgtgcagaaggcggtgctgagcggctccggcaaagagtctatcgagttcaaatacatcaacgatcgcggtgacaccaccgtgcgccgccatccgttcgaaggcgtgctgcacaacatggagcgccgctataaagagaccgagtccagcgcggtgcgcgaagagctggcgaagttcatcagcaaccgcccttgcgcctcgtgccacggcactcgcctgcgtgaagaagcgcgcaacgtgtttgtcgaagacaccacgctgccggagatctccgatctgagcatcggccatgcgatgaccttcttccagaacatgaagctcagcggccagcgcgccaaaatcgccgagaaagtgctgaaagagatcggcgaccgcctgaaattcctggtgaacgtcggcctgaactacctgtcactgtctcgctcggcggagacgctctccggcggcgaagcgcagcgaatccgtttggccagccagatcggcgccggcctggtgggcgtgatgtacgtgctggatgagccgtcgatcggcctgcaccagcgcgacaacgagcgcctgctggaaacgctgatccacctgcgcaacctcggcaacacggtgatcgtggtggagcatgacgaagacgccatccgcgccgccgatcacgtgatcgacatcggccccggcgccggcgtacacggcggccaggtggtggcggaaggcaccgtcgacgacatcatggcgcagccggaatcgctgaccggccagttcctcagcggtaaacgcgagatcgccatccccgcgcagcgcgtgcaggccgatccgaccaaggtgctgaagctgagcggcgcgcgcggcaacaacctgaaagacgtgacgctgacgctgccggtcggtctgtttacctgcatcaccggcgtgtccggctccggcaaatcgacgctgatcaacgatacgctgttcccgatcgcccagcgccagctcaacggcgccaccatcgccgaaccggcgccgttccgcgaagtgaccggcctggaacatttcgacaaggtgatcgacatcgatcagagcccgatcggccgcacaccgcgctccaacccggccacctataccggcatcttcaccccggtgcgcgagctgttcgccggcgtgccggaatcgcgcagccgcggttacacgccgggccgcttcagcttcaacgtcaagggcgggcgctgtgaagcctgccagggcgacggggtgatcaaggtcgagatgcacttcctgccggacatctacgtgccgtgcgaccagtgcaagggcaagcgttataaccgcgaaacgctggaagtgaagtacaagggcaagagcatccacgaagtgctggagatgaccatcgaagaagcgcgcgatttcttcgacgcggtgccggcgctggcgcgcaagctgcagaccctgatggatgtcggcctgtcctacatccgcctcggccagtcggccaccacgctctccggcggtgaagcgcagcgcgtcaagctggcgcgcgaactgtcgaagcgcggcaccggccaaacgctgtatatcctcgacgaaccgaccaccggtctgcacttcgccgatatccagcagctgttggcggtgctgcatcagctgcgcgatcagggcaacaccatcgtggtcatcgaacataacctggacgtgatcaagaccgccgactggatcgtcgatctggggccggaaggcggcagcggcggtggcgagatcctggtcgccggcacgccggaaacggtcgccgactgcgagaaatcgcacaccgcacgcttcctgaagccgctgttgaaccagtaatgtcgccggcgtgcaggccgtcgttcaggcggtccgcacgctgccccgtttccccgcaatcgaacagaaacaggcaagatttcgacattttcaggcatttccctccacgctcaccgcttctatcatcaatgttccctcggcggccgccctgtctgattcaggccgcgtctcgccggcacttcgctgccggtcaaacgttgtcccccctacattgataactggagcgaccatgaacattacccatgcctatgccgcgcatgacgcgaagtctgcgctggtgcctttcgattaccagccgcgcgccctgcgcgaccacgatgtgcagattcaggtgttgttctgcggcgtctgccactcggatctgcaccaggcgcgcaatgaatggagcaatacgatttacccggtggtgccgggccacgaaatcgtcggccgcgttagcgccgtcggcgaccatgtctcgcgttaccggatcggcgatctggtcggcgtcggttgcatggtggattcctgccgcagctgcccgagctgcgatgaggggctggaacagtattgcgagaacggttttaccggcacctataacggccaggatcgccacaccggcgccgtgacctacggcggctactccaccaatctggtggtggatcaggacttcgtgctgcgcgtgccggaaaacctcgatccggccggcgtcgcgccgctgctgtgcgccggcatcaccacctattcgccgctgcgccagtggggcgcggggccaggcaaaaaggtcggcatcgtcgggctcggcgggctggggcacatgggcgtcaaactggcgcgggcgatgggcgcgcatgtggtgctgttcaccacctcgccgtcgaaaatcgaagacgccaagcgcctcggcgcccatgaagtggtgatttcgcgcaacccggatgagatggcgcagcacgtcaacagcttcgacttcatcctcaacacggtagcggctcagcacgatctgaacccgttcctcaacttgctgcgccgcgacggcaccctgacgctggtcggcgcgccggagcacgatcatccgtcaccgcaggtgttcaacctgatcatgaagcgccgccgcatcgccggttcgctgatcggcggcatcgcggaaacgcaagagatgctggacttctgcgggcagcacggcatcacgtcggatatcgagctgatcccgatgcagcaaattaatgaggcctatgaacgcatgctgaaaagcgacgtgaagtaccgcttcgtggtggatatcgactcgctgcgcgcctgatgacggcgggcgcccggcggcgcccgtttttttatagctgcttgatgatcctggccgggttgccgcccaccacgcaattggccggcacgtctttggtcaccaccgcgccggaggccacgaccgcattatcgccgatggtcactcccggattgatcaccgcgcgcccgccgatccacacgttgtcgccaagcctgacactcttaccgaactccgccccgccgacgcgagtctcggcgtccagcggatgggtggcggtatagatatgcacgcccggcgccagcaggcagttgtcgccgatatgcacctcgcatacgtcgaggatcacgcagtcgaagttggcgtagaagttcttgccgagatagatgttatagccgtagtcgcagcggaaggtcggctcgatggtgccgccctgatagcggcccagcaactcacccagccattgtttgcgcagctcgccctcttccggcgaagagtggttatagcgatgcgttagctggcgtgcgcgccggcgttcgctgcgcagcagttcatcgccggcgtcgtacagttccccggcgatcatcttgcgcttttcttcgctcatggccatgtcggcctccttcatccgcgtgtcttgaatgcccaagcgtagctgttttagtgccgcaataaaaagggaacgttcccaaactcaggtcgcgatcacgctttaacatgaaaaaaacagaagaaaaacgggcgccgccgcccggcaatcaggcgcgcagttcctggcgcacgtgttcgggcaggccgtccaccaccagctgataggagctgtcgatcagcgtgtaaaactgcgagttcggcaggttgccgtcgagaaacaccgtattccagtgcgccttgttcagaccgtcgcaggcgacgatctccggatggtgttcacgcaggctttccgccagctccgggctggacttgaccgccagcgccggccgcccttcgacctcgcacaccatggcgaacatcacgtcacccaccttgatctggctggcctgccactggttctggtcgctctgctccgcgcccggcttcgccatgcagtactccagcaatgcgctgttattcattgggttattccccctgtaacgtggccacaatacggcgtgatccgccgtggatgcggtgctcccccagccagatgccctgccatgtgcccaacatcagccgcccgtgcctgacgggcagcgtcaaggaagcgcccagcagcgaggatttgatgtgcgccggcatgtcgtccggcccttcgtagtcatgctgatagggtgcgttttccggcacctgacgcaggaaatgctgctccatatcggctcgcaccgtgggatcgcagttctcgttgagcgtcagcgaggccgaggtgtgctgcagcaacagatgcagcaggccggtttgcaggcggtgtaagtgggttaactggttgactatctcgtcggtaaccagatgaaagccacgcgcttttgcgctgaggattagcgtttgctgatgccacatgagtgagcgcccctcaatcagtatattctctctccggtttgcggcaacttcggcggcgcgccggcaataaaaaaggagcgatatcgctatcgctcccgatgaacgtccgttcagactaacaggcgttactgcaccgcggcaaacgcctcggccacctgacgcacgttgttgtggttcaggccggccacgcacatgcggccgctgtggatcaggtagacaccgaactcttcacgcaagcgatcgacctgcgccgcgctgaagccggtgtagctgaacatgccgcgctgcgccaacaggtaatcaaagttgcgctgcggcagcgcgctcttcagggtgtccaccagcgcgtgacgcatctcgaggatgcgggtgcgcatgctctccacctcgtccagccactgggttttgagctgggcgtcgttcagcaccttggccaccagctgcgcgccgaagtttggcgggcttgagtagttgcggcgcacggtggccttcagctggcccagcacgcgcccggccgcctcttcgctttcgcacaccaccgacaggccgccgacgcgctcgccgtacagcgagaagatcttcgagaacgaattgctcaccaggcacggcaaaccggccgccgcgatggcgcgaatggcgtaggcgtcctgctccatgccgccgccgaagccctgataggcgatgtcgaggaacggaatgatttcacgttcggcgatcaccttgaccacctcatcccactgggcgggagtcaggtcggaaccggtcgggttgtggcagcacgggtgcagcagcgcaatgctgtgcttcggcagctgtttcagcgcagccagcatggcgtcgaacttcacgcccaggctttcgctgtcgaaatatggataggtattcactttgaaaccggcgccgctgaagatggcgacgtggttttcccaggtcggatcgctgacccacacctgcgaatccgggaaatagcttttcaggaagtcggcgcccactttcaacgcgccggaaccgccgacggtctgaatggtggcgatgcgcccctgctgcagcatcgggtgctgcgcgccgaacagcagctgctggatggcggaacggtaagactgcagcccttccatcggcaggtataccgaggcgccatgctcgacgctgttcaactgcgcttgcgccgcggcgaccgcccgcatctgcggaatgatgccctgcgcatcgtagtacaggccgatgctcaggttcaccttgtgcgcgcgcgggtcttgtttgaatttttccatcagcgacagaatgggatcgccggcataggcgtcaacgttctggaacacggggtttttctcctggtttattgtggttttgggcacagcgttacgttcctaatatagacggaaaagcgcattcggttttagctttatctcgccaccggcaataaaccgttttccttgatgcgattgagcaccaccgccgttttgatatgcgccacgcttttgtgcggcgacagcgtctggctgatgaattcgctcagcgccggcagatccgccaccgccactttgagcaggtaatcggcgtcgccggtggtcttgtaagcgtccaggatcgcgtccacttcctccagcatctgatgaaagctgtcgatctgctcctgcgcgtgcgtgatcaggctgacttcgatcagccccaccagccccaggccgaccgcctccggcgccagccgcgcgtggtaaccgcggatcagctgcgcctgctccaggctgatgcgccgccgcgaacattgggaggcggagagccccaccagctcgctcagctcctgattggtcagacggccgttggcctgtaacagcgtcaggattttcatatcaaaatcgtcaatgttgtacatagccacctgtaaactgtgttaataaatgttgacgttacagcctaccagtttttttaccgttgccgacgtcacaccctggcgcttaaatcgcgtacagcagcaacgcccggcgttttcgccggtaagcggcataaaaaacggctaactcatgcaggcaaacgacaattaacggcgaagtaacgcataaaaccacgaatgtataaaaaggacgccagatgaaaaagttactccctctcgcgctgctgctcgccgccggcagcgccggcgcgcaatcccacctggacaaagtgctgcagcaaaagaccctggaggtctgcaccaccggcgactacaagccctacaccttcctcaaggaagacggcggctatgaaggcatcgatatcgacatggcggaatcgctggcgaagagcctgggcgccaaggtgaagtgggtgaaaaccagctggaaaaccctgacgccggacttcgtctccggcaagtgcgacatcgccatgggcggcatctccgtcacgctggagcgacaaaaacaggtgttcttcgccgacaagctggataccgatggcaaaatcccgctggtgcgctgcaccgacgtgaagaaataccgcacgatagaacagatcaacaaaccgtcggtgcgcctgctggaaccggcgggcggcaccaatgaagccttcgtgcacgcctatttgccgaaggccaaactgacgctgacgcacgacaacatgagcattttccagcagctggtggatcgcaaggcggacgtgatgatcaccgacgcctccgaggcgttgtaccaacaaaagcgctatccgaagctgtgcgcggtgaatccgaccaaaccgatgcagtacggcgagaaggcttacatgctgccgcgcgacgatctgagctggaaactgtatgtggatcagtggctgcacctggccaaggcgaccggcgagtatcagaaaattatcgacaagtggttggcggtaaagaagtaacgcgctgagaaacggggccgacgcacgtcggcccctgcggcgcatcagtcaccgatgtattccatcgccacgcgctgcgtgagcttggtgatcagttcataagcgctgatgccggtacaggcggcgatacgctcgaccggcaacgccggcccccacagcaccgcttcatcccccaccttatcggcggcgtccggcccgagatcgaccgaaatcatgtccatcgacacccggccgacgatcggcacttcgcggccgttaatcaggatcggcgtgccggtcggcgcgctgcgcgggtaaccgtcgccgtatcccatcgccaccacgccaaggcgagtatcgcgcggacttacccaggtgccgccatagcccaccgcttcaccggcctggtgctcgcgcaccgcgatcaggctggatttcagcgtcatcgccggcagcaggccatacccggcgccgctgccgttatccagcggcgagacgccgtacagaatgatgccgggacgcacccactcgttgtgggcatccggccacagcagcgtgccgccggaggcggcgaccgagcgctggcccggtttgcctagcgcgaactgctcaaagcaggcgatctgtttcagggtggcgtcggactccggctcatcggcgcggctgaagtggctcatgatattgaccggctgcgccacgttgcggcaggcgcacaggcgctgataaaacgcctccgcctgctcggggcgcacccccagccgatgcatgccggtatcgagcttcatccacaccggcaccgggcgcgccagttcggcctgctccagcgcttcgagctgttcgatgcagtgcactgcggtttcgatgttgttcgccaccagcaccggcaggtcttcggcacagaagaagccttccagcagcaggatcggtttgacgatgccgccggagcgcagcatcagcgcctcgccgatgcgcgccacgccgtagcagtcggcgtcttgcagggtgtgtgctgtttccagcaggccatgtccataagcgtttgctttcacaacggcaatcaggcggctttgcggcgcctggcggcgcacctgttgcagattatgtcgcagagcgcggcggtcgattacagcggttgccgctttcatttcagttccttagctgattattcgtcatcgtattgtggccccgcgtagttatcgaaacgcgaccactggccgttaaaggtaaggcgcacggtgccgatcgggccgttacgctgcttaccgataataatttccgcgatccctttcagatcgctgttctcgtgatacacctcatcacgatagatgaacataatcaggtcggcatcctgctcgatggagccggattcacgcaggtcggagttgaccgggcgtttgtcggcgcgctgctccaggctgcggttcagctgcgacagcgccaccaccggcacctgcagctctttcgccagcgccttcagcgagcgcgaaatctcggcgatctccagcgtacggttgtcggacagggccggcacgcgcatcagctgcaggtagtcgatcatgatcaggctaagcccgtcgtgctcgcggaaaatgcgccgcgcgcgcgagcgcacttcggtcggcgtcaggccggaggagtcgtcgatgtacatgttgcgcttctccagcaggatgcccatggtgctggaaatgcgcgcccagtcctcatcgtcgagctggccggtacggatgcgcgtctgatccacacgcgacagcgacgccagcatacgcatcatgatctgttcgccgggcatctccaggctgaagatcagcaccggtttttcctgggtcatcgcggcgttttcgcacaggttcatggcgaaggtggttttccccatcgaaggacgggcggcgacgatgatcagatcggacttttgcatgcccgcggttttcttgttgaggtcctgatagccggtatcgaccccggtcacgccgtcgtgcggctgctgatacagctgctcgatacgcgacacggtgtcttccaggatgcgttcgatgcccttcgggccctcgtctttgctggcgcggttctcggcgatttggaagacgcgggactccgccagatcgagcagatcttcactgctgcgcccttgcggatcgtagccggcgtcggcgatctcgttagcgaccgagatcatctcgcgcaccaccgcgcgctcgcgcacgatgtcggcgtaagcgccgatgttggcggcgctcggggtgttcttcgacagctcggccaggtaggcgaagccgccgaccgagtccagctcgcccttctgctccagcgattcggacagggtgatgaggtcgataggcttgctcatctccagcagacgctgcatctcggtaaagatcaggcgatgcgggcggctgaagaagtcgttggcgaccacgcgctccgccacgttgtcccaacgctcgttatccagcatcaaaccgcccaacaccgactgctcggcctccagcgagtgcggcggcatcttcagcccttccatctgacgatctctggaacgctctctggtttcgtccgcgtttgttttgttggttggtttttttcctgccatgaaacgtagtctttatccggttgcgaatgaaggatcttgacgcgagagtatacgtgatttttgcgtcataaccgatgcaaaaaaggtattgaatcccgcacgggtgaactggatctccgatactaaaaagaatagggtgaaatcagatactcaaacgaggtaacgatatggccaagcgcattcagttttccgccaccggcgggccggaagtcttgcaatacgttgattttacaccgctcgatcccgccgccggcgaagtgcagatcgagaacaaagcgatcggcatcaactacatcgacacctatgtgcgcagcgggctgtacgcgccggccagcctgccgagcggcctcggcaccgaggcggccggcgtggtggtcaaggttggcgccggggtcagcgcgatcaaaccgggcgaccgggtggtgtatgcgcagtcgtcgctcggcgcctacagcgaagtccacaatgtgccggaagaaaaagtggcgctgctgccgcacaacctgagctttgagcagggcgccgcttctttcctgaaagggctgacggtgcactatctgctgcgccagacccacgacgtgcagccgggtgaagtgttcctgttccatgccgccgccggcggcgtcgggctgatcgcctgccaatgggccaaagcgctgggcgcgcgcctgatcggcagcgtcggctccgacgagaaggccgcgctggcgaaacaggccggcgcctgggccaccatcaactaccacaaagaggatatcgcccagcgggtggccgagctgacgcacggcgagaaggttggcgtggtgtacgattcggtggggcaaagcacctggcaggcctcgctcaacagcctgaagcggcgcggcctgatggtcagcttcggcaacgcctccggcccggtgacgggagtcgatctggcgctgctgaatcagaagggctcgctgtacgtcacccgcccttccctcaacggttacatcaccaaccgcgccgagctgcagtacgccagcaatgagctgttctcgctgatcggcagcggcgccattcgggtggaagtgagagacgagcagaaattcgcgctggccgacgcccagcgtgcgcaccaggtgctggaaagccgcagcaccagcggttccagcctgctgatcccctgatagcagccaaagaaaagggctccttgcggagccctttctgttactgcgttttgtaggggtagagcagagtccgccagagacaggggttgctttagcaacacgaattttaggtgtctctcacggtgatgaaatgggtcgcatcactgcatcgaccaacatcctaacagccccgtccggcaaaaaacacgctttatgtgccacatcgccggggaaaactgccaagctgtgatcgctgccgcattagcgtggtgggtagttatgcaagtttcatcgcgactgactgattattcagcaaaaaatcagtaacgcctgacctggggtttctgcattgaacggtaaatccataccccaactaccgccaaaatcagccacggtagcagcttgatgaccaccgcgaataacccgcccaacaacatgaacgccgccgccgccaacagcgcagcgaagatccccagcagcgagatgccggtcaccatcagcatcaccacaaagccaatgagaaagaagatttccaacatgattgctcctttgcaatgcaacgtatctgcagagtgaattacaagaagcgtgccagaatggcggaagggctaacctattgaaaaaacgaggaaggcatccggcagtgcgccgaatgcctggtgaaaaagactaactgttggtcaaattttttcggctacgccatttcgacacgcggctgacgcactaacgccagcgcctgctccaccacccgcgcatcggcgcccggcttgtgggcgttctcgctcagatggcgacgccactggcgcgcgcccggcacaccctggaacaaaccgaggatatggcgagtaatgtggccgagataggtgccgttggacagctcacgctcaatatacggatacagcgcttcgacgatcgccacgctgtccggcaccgcggtctgcacgccgaacagttcgctgtcgacccgcgccaggatgcccggattctggtaagcctcgcgccccatcatcacgccgtccagatgctgcaagtgctgttgcgcctctcccagcgttttcaccccgccgttgatggcgatggtcagcgccgggaaatcccgcttcagctgataaacgcgcgggtagtccagcggcggcacttcgcggttctctttcgggctgaggccggagagccaggctttgcgagcgtggatggtgaacatgtcgcactcgccacgcccggcgacggtctggataaagtcgcacaggaaagcgtagctgtcctgatcgtcaatgccgatgcgggtcttcaccgtcaccggaatcgatacgacgtcgcgcatcgccttgatgcagtcggcgaccagcgtcgcctgccccatcaggcaggcgccgaacataccgttttgcacccgatcggacggacagccgacgttgaggttaatctcgtcataaccgcgctgctccgccagtttggcgcagtgcgccagcgcggccggatcgctgccgcccagctgcagcgccaccggatgctcttcttcgctataggccagatagtcgcccttgccgtggatgatcgcgccggtggtcaccatttcggtgtacaacagcgtttccttggtcagcaggcggtggaagtaacggcaatgacgatcggtccagtcgagcattggcgcgatggagaagcgattggcggcgtaggttggggcgtggttgtctttcgtcatgctgagttactggctacctgagtctgtctgggttcaacgaacggcgcgcggccgcaaacggctattataacgacaatcgacgccgttgggaaaaccgccttgctggtggcgtaaataagcgggagtaaggcgaataaattcactcgttcaggtgttatctcattacgggcgcgcacggcgcctttgccttgaggacacaaccatgaacagcttcattaaacgcctgctggcatcggccattgccggctgcctgctgttttccggcgcggcgctggcgatgggcggcgacggcagcggccaaaccccgccgacctgtccgaaaggccaggtttacgacagtaaaacccagacctgcacggtggataaaggcagcaaagtcgacgacgccgaccgcactaactatgcctatgcactggcgaaaagcggccgctatcaggaagcgatcgatatgctcaacacgctgcaaaatcccaacaccgccgtcgcactgaattatcgcggctacgccacgcgcaaactgggccgcaccgatgagggtatcggctattatttaaaatcagtggccctcgatccgaaataccccaaagtgcgcgagtaccttggggaagcctatatgctgaaagggcggcccgacctggcgcgccaacagctgctggtgatccagtcgctgtgcggcaccgggtgcgaggagtaccgagatttggcggcggccatcgaccgccatccggaatcttgatccgacgcgcctgcggaggtgactatcagcggcgatgcgatacgcgatgaactcggccactatctctcccgcctgtggcgctatgcgctggtgctttcgcaccggcgggatgtcgccgacgacctggtgcaggcaacctgcgtgcgtgcgctggaacgcgccgcgcaattcacccccggttcacacctggatcgctggttgtttgccatcttgcactctatttggctcaatgaagttcgcgcccagcatcgtcgtcaggggcaaggctgcatggcggcggaagagcttggcgatgcggacaacggtgaacagccggtctggctcaatgaagtgatgcggcgcctaagccggttgccggcggcccagcgcaacgcgctgtttctggtgtatgtcgaagggctgtcctaccgggaagcggcgaaagtgctggcggtgccaatcggcaccgtcatgagccgcctggcggccgcacgcctggccttggccgatgaccgccagttgccaaacgacgattcgcaccgtaagaagccccctcctccgcccttgccccgcactcgccgataaaccgctggccgccgattcgtgttaagcggcctattccaacgcgcggataacccggcacggctgccccagcgccagcacattggccggaatgtcgccggtgacgatgctgcccgcgccgatagtcgtgccatcgccgatggtcactcccggcaggatcaccacgttgccgccgatccagacgttgctgccgatagacaccggctgcgccgaggtgcggaaaggaaaagccgggtcaccggtaaagcgttcaccggccttcagcggatgactcggcgtgtagatttgtacgttggggccgatcagcgtgttgtcgccgatggtgatggtgttgcagtcgaggaacaccgcattgacgttgataaaacagtttttaccgatgcggacatgctgcccgtagtcgcaccagaatggcgtttcgatccagctcgcctcaccccagttgccgaacagctcgccgagcaggcgatttttctcgtccgcctgatgcgagtccagcgcccccaggcttttggtcaacgccctcgcccgatggtacagggcgatcagttcttcatcgcggctgttgtattccaggccgcttaacagcttctctctttccgtcatcacacagggctcctgctcatcacgcgggtgaaaggctttataccgctctcgtcccccgctctccagcgctaaaaccggcaacgttgatctaccgcccggcggaggggaaaagttgtgatgcatctctcttttagcgcactcagcgcgcctttctctgcgctatcctcaggggaaaagggggcaactatcggcgattcgccgtaatcatggtaaaatcggcttttttacgtaccgggatatttgcgatgaactcaaccacccaggaaaagctgctggcgcaggcggaacgcctctgccagcaacgcaatgtgcgattgacgccgcaacggctggaagtgctgcgtctgatgactcagcaacccggtgcaatcagcgcttatgacctgctcgatctgctgcgcgtcgccgaaccgcaggccaagccgccgacggtctaccgcgcgctggattttctgctggagcaagggtttatccatagggtggagtccgccaacagctacgtgctgtgccaccacttcgaacagccgatgcatacgtccgcgctgtttatctgcgatcgctgcggccaggtgaccgaacgcaccaccgaaggcgtggaggagacgctgcagaagctggcgcaggaagccggatttgcgctgcggcacagcgtggtggaagcgcacggcctgtgcgccggttgcgttgaagttgaagcttgtgacagcaagcatgactgcgccgaacacgatcacagcatcgccatcaagaagaagtaagacgaagtcaggtacttccctgtacctgcggccggggcgccagaggatggagcgacgccggcctgcgctgttgccggccgccgtcagtggcggccctgcgtgttaccagcggtgtttggtgtgatcttcccaggccttcacctctttttcggccgcctctttctggtaaccgtagcgctcctgaattttgccgaccagctgttcgcgtttcccttcgatgaccgtcagatcgtcatcggtcagcttgccccatttctctttcactttgcctttcagctgcttccagttaccgtcggcttgatctttattcatagtctctccgttaacctgtggtgaatcagtgatccctgtcgccggccggggttaaccagaaatttttctggctgatgctcccttcaccttaagaagcaccgctccccttcatttaccagccacatgattcattctagttaaacatggaaataaaaaagccaaaacacaggataaaaaaccattaacaaacaagataaaaacaaaaaacgctaacaaacaacgaactaacgcgaacagaccaaggctgaaaacatgtaagcaaacatgatcaaaatcataagaaaaactaaccattaacccaacaagacgtccggtttaatgggcagtaaaccagctgccgcgcacctggtgacggtgccaaatccagcccaacgccaggccgcgcagcgccagaaacaccgccagcgccagccaaagcccgtggttgccaagcagcggcacgctgagcagcgcaataccatatcccgccgcggccaccgccatgctgttgcgcatctcggcgccgcgcgtggcgccgataaacatgccgtccagcaaatagcaccacaccccaaccagcggcagaatgacctgccagggtaaataatgggcggccaacgcacgcagttccggcaaagaggtcaaggctgccacgatctgctggccggtaacggcatacgccaggccgaaggccaacgcgaccagccctgcctgcctgcaggccgcatgccacactttgcgcagttggctgtcgtcccgggcgccgtaggcgtggcccgaatgagcctccaccgcataagcgaaaccgtcgagcgcataggcggtgaacgtcagcagattcatcaataccgcattgaccgccaccacctcgcttcccaggcgagcgccgaaaatggtcaacgacgcaaagcacagttgcagcaacaatgagcgcagcatgatgtcgcggttgagcgccagcaggcgacgcagatcgccacgccaggcctggcgcagcatctgcagggtaataccgcgcaggcgcatcacccgccacgccaaccacaggccgagcagcagcgtagcgtattcggcgatggcggttgccgccgccgccccccgcacattccagcccaggcccatcaccagccagatatccagcacgatgttcagcaggttgccgacgatcagcaggatcaccggcgcccgcacgtactgtacgccaagcagccagcccagcagcaccaggttggccagcgccgccggggcgcttaaccagcggatctcaagaaaacgccgcgcctgttccagcacgtcggcatcgccgccgacgatccgcagcgccagttcgatcagcggatagcgcagcaggacgatcgccaccccggccaacagcgccagcagcagcggttgcataaaggcgcgcgccagcgcctgggggttctgcgcccccagcgcttgcgccgccaggccggtagtgctcatgcgcaggaacagcagcagcatgaacaggaagctggtcgccaccgcaccgatcgccacgccccccagataaatggggctgtcgaggtggccgatcaccgcggtgtccaccaacccgagcagcggcacggtaatattggagaagatcatcggcagggcgaggcgccacagggctttatcggtgtcgctggtgaaagcggaaatcaggcgcatgatgggatgttcctgtgactgagtgacaaagggcgaagtcagaaacaaaaacgccccaaaacaggggcgattgatacagggagcggcggtgatggcgcggcgattaaatccagtcgccgttgcggatcacgccgaccgccagcccttcgatagtgaaattctgctgacgcagatcgaccacgatcggttggaattcgttgttctccggcagcagttcaaccacgttgccgtgctttttcaagcgcttgaccgtcacttcgtcttcgatccgcgcgaccacgacctggccgttgcgcacgtcttgcgttttgtgcaccgccagcagatcgccatccagaatgccgatgtcgcgcattgacatgccgttcacccgcagcaggaaatcggcgctcggtttaaacagggaaggatccacctgatagtgcccttcgatgtgctgctgcgccagcagcggctcgccggcggcgacgcggccgatcagcggcagcccttcttcttcttccatcagcagacggataccgcgcgaggcaccggagacgatttcgatcacgcctttgcgtgccagcgccttcaggtgctcttcggcggcgttaggcgaacggaaccccagacgcatcgcgatctcggcacgcgttggtggcatgcccgtttgcgaaatgtgctcgcgaatcagatcgtagacctcttgctgtctggtagttagtgctttcattccgccccctgtttgtttatacagtcttgctgtgagtatatacaggtaagcgcggattgggaaccgaagaataaataaaaatcagtcagtaggcgcttttcgtcagccgaaatgctgccataagaccgtgccccaaacgaacagcgccagcacgatcgccagcgacaccgccgccgatcccatgtccttggcccgcccggacagctcgtgatgttcgctgccgatgcgatccaccaccgcctcgatcgcgctgttcaggatctcgacgatcatcaccagcgctaccgatccgatcaataaaatgcgcgctatcgcacccacatccagccagacagccagtatgatagccagaagggtgaccaccagttcctggcggaaagccgcttcgtgctgccaggcggcggatagccctttataagaatagccggctgccttgatgatgcgggtcagtccggttgcttggtttgccatgttttcgtgcctttctcagaggtcggtcataataaaaagagtctagaacagtccgcgctgacggctctcggttttcgaacaccacagatctgctacccggtttctggtatgcttgcggcgcattgctaacaagaggcttcacgttgttatgtcaggttggcgtaaaatttattataaaatattgaatttaccacttaaattgttggtaagaagtaaggtcatcccttcagatccggttaccgagctagggttggatccctcacggccgattttgtatgttttaccttacaattccaaggcggatttgctgacgctgcgcacccagtgcctggcgcaggatctgcccgatccgctcaactcgctggagatcgacggcaccgtgctgccgagctacgtgttcattcacgacggcccgcgcgtattccgctattacaccccaaaagaagagtcggtaaagctgttccacgactatctggatctgcatcgcagcaacccggatctcgacattcagatgctgccggtttcggtgatgttcggccgttcgccgggccgcgaaggccacggcacgccgcacctgcgtctgttgaacggcgtgcagaaattcttcgccgtgctgtggctcggccgcgacagcttcgtgcgtttctccaacaccgtgtcgctgcgccgcatggctaccgaacacggcacggataaaaccatcgcgcagaaactggcgcgcgtggcgcgcatgcacttctcgcgtcagcgcctggccgcggtgggcccgagtctgccggcccgtcaggatctgttcaacaagctgttggcgtccaaagcgatcgaaaaagcggtcgaggacgaagcgcgcagcaagaagatctcgcacgagaaggcccagcagaacgccatcgcgctgatggaagagatcgccgccgacttctcctacgaaaccgtgcgcctgtccgaccgcgtgctgagctggacctggaaccggctgtatcagggcatcaacgtcaccaacgccgagcgcgtgcgccagctggcgcaggacggccacgagatcgtctacgtgccctgccaccgcagccacatggactatctgctgctgtcgtacgtgctgtatcaccagggcctggtgccgccgcacatcgctgcgggcatcaacctcaacttctggccggcgggcccgatcttccgtcgcctgggcgcgttcttcatccgccgcacctttaaaggcaacaagctgtattcgacggtgttccgtgaatacctcggcgagctgttcacccgcggttactcggtggaatatttcgtggaaggcggccgttcccgcaccgggcgtttgctggagccgaagaccggcaccctgtcgatgaccatccaggcgatgctgcgcggcggcacccgtccgatcacgctggtgccgatttacatcggttacgaacacgtgatggaagtgggtacctacgccaaagagctgcgcggcgccaccaaggaaaaagagagcctgccgcagatgctgcgcggcctgcgcaagctgcgcaacctgggccagggatacgtcaacttcggcgaaccgctgccattgacggcttacctcaaccagaacgtgccgcagtggcgcgaatcgatcgatccgatcgaggctcagcgtccaagctggctgacgccgacggtcaacgatctggccggccagatcatggtgcgcatcaacaatgccgccgcagccaacgccatgaacctgtgttccaccgcgctgctggcctcgcgtcagcgttcgctgacccgcgagcagctggtcgagcagctcgagtgctacctgcagctgatgcgcaacgcgccttacgcgcgtgacgtcaccgtgccgacgcaaacgccggatgagctgctggatcacgcgctgaacatgaacaagttcgaggtggagaaggacagcatcggcgacatcatcatcctgccgcgcgagcaggcggtgctgatgacctattaccgcaacaacatccaccatctgctggtgttgccgtcgctgatcgccagcatcgtgatgcatcatcgccgggtgtcgcgcgccgagctgctgcgccagatcggcatgatctacccgatgctgaaagccgagctgttcctgcataacgacaaggaacagctgccggaggtgctgcggccgatgatcgacgagctgatccgtcaacagctgatctgcgacaaaggcgacgatctggtgctcaacccggcgcgcattcgcccgctgcagctgctggccgccggggtgcgcgaaaccctgcaacgctacgccatcaccatgtcgatcctcagcgccaacccgagcatcaaccgcggcgcgctggagaaagagagccgcatcatggcgcaacgtctgtcggtgctgcacggcatcaatgcgccggagttcttcgacaaggcggtgttctccaccctggtggcgacgctgcgtgaagaaggctacatcaacgacagcggcgatgcgatccgcgagcacaccctcgaggtgtacagcatgctgagcgatctgatcacgccggaaatcaagctgaccatcgaaagcgtcaacatgccggaagagaccaacgctctgccgaaaaccgatgcggaagaagagaaagacgagtgatttcgcccggcgcggaaacacaaaaggcaccccttggggtgccttttttcttgcggcagggaaccgttacgccggcagatagctcagcgcgatgccgataaacaccaccagcccgacatagttgttctgcagaaaggccttgaagcaggcgtcgcgctcgcgcccggcgatctgcttctgctggtgaatgaacagtgcgcccgccagcagcagcgaccagtaaaacgcgccgccgagctgcgccagataaccgacccacaccagcagcaacaacgtcgcgaactgcaacagcccgacgatcagcttgtcataacgcccgaacaggatagcggtggacttgatgccgattttcagatcatcatcgcgatcgaccatcgcatacagcgtgtcataggccaccgtccagcagatgttcgccagcagcagcagccagcagctgagcggcagcgattcgctgaccgccgcataacccatcggaatgccccagccgaacgcggcgcccagcacgaactgcggcaggttggtcacccgcttcataaacggatacacccaggccagcgccagcgccgccagagacagccagatggtcatcgcattcagcgtcaacaccaggcagaacgagatcagcaccagcaccacgaacagcaccttggcctctttcgcgctcacccggccgctcggcatcggccgcccggcggtgcgtttcacgtagccgtccaccgcgcgatcggcatagtcattcaccacgcagccggcggcgcgcatcaggaacacgccgagcacgaacaccaccagaatcgacagcggcggcacgccttttccggccagccacagtgcccacagcgtcggccacaacagcaacagcgtgccaatcggtttatcaatgcgcatcaaatggctgtaagcccgccatttactttgagtcacgcttccctccaacgtcttgctctcctctcttatgcggggaccgctgaatacagcggcgaagccggtaaaaacagttcggtcagcagcagcggcttgcccgccagccgcaaccgtgaacgacgcgcccacagcgcatcctgtcggccgatatggatatagtcgcgggtcagatcgccgctgctgaacaaatagcgccccagcggcagcgtccccagatccaccagcgcctggtcggggccggtcagcgtatgttccgggatcaccgtgcgccccagcagccagggctggccgtcgcccagcagcaccacttcgcgcagccagtagcgcgggctatcgggcaggtggttcgcctcgtcgcccagcgcctcgcgcgtgacgaagcattcgcgctgcggttcaacgcgcacctgggcgcaatggcgttcaaatcgtcgggtcatggagcctaactccatcagccagtcgctgacggcggcgggcgccggaggatcctgttcggataaccactccagcggcggcaggatggaatccctgatgccagacattgctttactcctcgcctgaaccgcagccggtacggcgcgccagacgatacaaactgttaacaggcccccattgtagcgcagaaatgcgaaagcggcaggctgattcgtggcgaaaacggcaggtctgtcggccggaaaaaccggggttctgtcatctttttgccatccgcattctctatcttcatttcccggcgcgctgacgattctgtgatcgcccgcaaagtttcagcttcctcgcgttgtgttatctacgcgcgtagataccctgatacggcagcgttgaatcgccatgcgtccgacatgatttgtcggcacacctttgttgccggcaccagggaaaccatctttaaccgcgcccctccaggcgcagaataaaagaggatagcactgccatgagcgaaacaacgcttgccccttcacagaccgccgacgccgcgctggcggccgatgaacgcctggcaaccaaagaggggcgcagccaattttggcgcgccaccttctcctgctggctcggcaccgccatggaatacgtcgacttcgcgctgtacggcctggcggccggcatggtgttcggcgacgtgttcttccccgaagccacgccgctggtggcgttgctggccagcttcgccacctactccgtcggcttcgtcgcgcggccgatcggcgcgctggtgttcggctggatcggcgatcgcaaaggccgccgcgtggtgctgatcaccaccgtggcgctgatgggcctctccaccacattgatcggcctgatcccgccctatgcgcaaatcggcgtctgggcgcccgcctgcctggtgatcctgcgcttcgcgcaggggttcggcgccggtgcggagctgtccggcggggcggtgatgctggcggaatacgcgccggccaagcggcgcgggctggtggcgtctatcatcgccataggctccaacagtggcaccctgctggcgtcgctggtgtggctgctggtattgcagctcgacaaggaagacctgatgagctggggctggcgcattccgttcctcgccagcatcctgatagccggggtggcgctgtatctgcgccgccacgtgcgggaaacgccggtgttcgaacgcgagctgcagcaaaaccaccagcgcatgctggacgccgcccaggccgcgccggatacgcgcagctacctgcagcgcaccaaggcgttctgggtgatgctcggcctgcgcatcggcgaaaacggcccctcctacctgtgccagggctttatcgtcggctacgtcgccaaggtgctgatggtcgataaatcggtgccggcgctggcggtgctgatcgcctcactgtgcggttttctggtgatcccgctggccggctggctctccgatcgtttcggccgccgcatcacctaccggtggttctgcctgctgctggtgctgtacgctttcccggcgttctggttgctcgacagccgtgagccggcgatcgtcatctcggtgatcgtggtcggcatgtgcatcgcatcgctggggatcttcggcgtgcaggcggcctacggcgtcgaactgttcggcgtgaagaaccgctactccaaaatggcgttcgccaaggagctcgggtcgatcctctccggcggcaccgcgccgctgatcgccaccgcgctgctgtccggtttcggtcactggtggcctgtcgcctgctattttgttgtaatggcggccatcggcttaatcaccaccttctttgctcccgaaacccgcggccgcgatctcaacctgccgcaggatgccgcgtagcgggaaggcgaacaggacctcaatttggataatcactccgcgcgccgcgttacccgcgccgacgtggctcgcatagcgggcacctccgtcgccgtggtcagctatgtgatcaacaacggtccgcgcccggtggcggaagccacccggctgcgcgtgctggcggcgatcgagcagaccggctaccggccgaacgacatcgcgcgagcgctggcctccggcagcacgcaaacctacgggctggtggtgccggatatttccaacccgttcttcgccacgctggcgcgggcgctgcagcaggaggccttcagccgcggccgcgtgctgctgctgggcgacgccggcgacgaccggcagcgcgaatatgagctgatcaacaacctgctgcgccgccaggtcgacggcctgctgtacaccagcgtcgatcgccatccgtggttcgatctgatccgcgcctccggcacgccctgcgtgatgatagataccatcgacagccaggccggcgtctgcgccattcgcgtcgacgagcgcgacgccgcctgccaggcgacccgccatctgctgcagcacggctatcgcgatatcggcatttttatcggcccgctgaccatgctcaacgcacaggatcgcctgaacggctggcgcgatgcgctgctggaagcgggcatcgcgccgcgcgacgaatggattttcgaggtgccctacacccgccagggcggttaccaggccacccagcgcctggtgcaaggcccgcgcccgcgcgccgttttcacctctaacgagcagcaggcgctcggctgcctgtcggcgctggcggaacatgggctgcgcgcgccgggcgatctggcgctgatctgttttaacggcacgcagcaatccgaattcagcgtgccgccgctcagcgcggtcgagcagccgatcgacgccatggccaagcgggccatcgccatgctggccgccggcgccgcgcccgccgagctgcatgaattcgcttttcaactgcgcatccgccactcgtgcggctgctagcggtttttcaggacaccttactatgcgtttaatcattgattgcgatcccggcaacggcgttcccggcgccaacgtcgatgacggtctggcgctggctctggcgctggcggccaaaccgcagttgcaactggagctgatcagcatcgtggccggcaataccccgcgtgaagtgggcttcgccgtcgcctccgatctgctggcgcagagcggctaccgggtaccggtcgccctcggcgcggcgcgcgccctgagcgagccgccggagccgtggcgcgcccatctggaccgcccgatcgccgatccgcagctggcggcgctgtggcgcgacttgcccgccccctcgctggccaacgcgcccgcaccggacgccgccatcgccatcggcgaactgatctgccggcatcccggcgagatcacgctggcggcgatcggcccgctgaccaacgttgcgcacgccatgcagctttacccgcagatggcgcaggcggtgaaagagatcgtgatcatgggcggcgtgttcaacgtcgaaggatacatcaaggacaccaattttggtttggatccggaagcggcgcggctggtgttgaacagcggtgccaatatcacgctggcgccgctggacgtcaccacccagaccatgctgacccaggcggatctggccgcgctgacccagccggataccccgctatgccgttatttgcgcaccaccacgcagccgtggatcgactattcgcgccatacgcggcgcctgccgggctgctggatccatgatgcgctggtgatcgcctggctgctggaaccgcagttggtcacgaccgaaatgttccatgtggatgtggcgctggaaggggcgttgacgcgcggcagctcacgccgttggcggccgggcggcctgcgcctgacggtcggtatgccgccgccgcagggcaagccggtgcgcatcatgcagcaggtggacaacgcccgtctgctggcgttgatcggcgcaacgctggcgcgcggatgaaaaaaggtgcgccaaggcgcaccaatcatcgagccagcatcggcagcgccgggtgttaccccttgcctttaacgctgctgataaacgttttacgcgcagtggtagagcccaacttctcggcctcattcatcagcttcagcgccttatcgatatcgcccgccttcaccgcctgcttgatgccgttattaaagtagctttcggtatcgttgagcatcggctccgccggtttctccggcgtcggcatcggtgccgccgccgcggccggggtgctcgaccccaccaccaccggcgccacgctcggcgcaggctgcagcatgccgatcatcacgttgccggtgccctgttcagcggtgaccttaagcttcagcgtgccggtcgtcgcgtggccggcgatcggatccgggatatccggcaccgcgttgcccaccccctgcgcataggccttggccgggttggtcagctgcgtagttttcaccaaatcctggcgagtggtgtacaccagcaggtaaatctgtttttgaccgagcgccggcgtcagcttcagcgtgccttcgagacgatcggaggacatcgcccccggcggctggtaagggaaatagctgctcgggtaatacgccgccgggcgcagatgctcgtccagcaccagcacgctcggcgcgtacagcgaattgtttttggcgaggctgctcagcgtcacttccagcgaaccgcgatcggccggcaacgtataggcggcgatcgccccctggatctcgccctgattgagctgcgggctgacggcgtcgagcttcacctcttgcgacaccggcggctgcaacggctgccacggcaggctttgcagcgtggcggcgctgatggccggcgcgacggaaacgttggccggcgtatcggcattggccgccaaaggcgcgccgacggtcagcgccagcgacaggcagagtgacagcagattctttttcatcgttatatcctctttcagcgccgcgatggttcaggcaagagatccggccgcggcgaatgcgattgggggagagcctgcggccctccccgtcctgtcgttaccaccaaatttccatctgggcgccgaaggtgacttcgtcatccttgccgcggctgaaggtatgcatgctggtgtcgttgtaagcggtgccggcgttatacccggtatcatcgccggtggcgtagccccacttctcatcccacttggcgtaggtggcgaacaggcggatggccggacgcgaccagatgctgttgcccgcctgccattgctgcgccagggtcactttatactggccgttgcgatcgccggtgcgctgggatttgacgttgtcatagccggcttccagcaaggtgctcatgatcggcgtccatttgtacatcgggcgcacgcccacggtgtaccaggtggtgccgttgttgttgtcgcggtcgatgtcctggaacatggcgacgtacatcagcgcccattgatcgttgaagtcgatggcgccgtgatccagcacgcggatcatcttgccgttgttatcgatggtggcgccttcgttgcggccgttgttctgcgaggtcatcgagtcggtggcgtactgcagcacgaacttgttgtaaccgttcaggatgctctgcgtgtgttccgcggtgaacatccagccgtctttgctggcgccgtccgccaggcggtagttatcctgcgcattggcgcggccgtagtccacgcccagctccagggtgccgcccgggttcagctccaggccggccagacgcaggtcgaaggtatcgttgacggtcggacgctgtttccattcgttatccagatagccgtaagagccgccggattcggagttgcgggtcacggcggcggacagcttgccgaagcccagatcgatgttctccagaccggcgcccgggccggagatatcccagtagtagaagtcgatcatgtgaacgtcatgacgctgatagaaacgcttaccggcccacagcgtggagcccggcagccagtcgatcaggtttttaccctgcacgttgacttcgcggaagcccggcgtcacgtcttcccagtcggaacgttgcgagaccgaataggccaggttggtgtcgaaatagaagctcttgtcgccttctttccacacttcctgccccagtttcagttcggcgtaggtttcacattcgttgccgagacggtatttgctcgcggcgccggtggccttgaagcactgttgctcaccgccgctgccggtccagccgatgccggaacgggcgtaaccgtgaaaatccacggccagcgcctgagtagagagaacaccggcggcgacagccagtgccagaggaagtttgcgcagagtagtcatcattattctcctgttataccgactttgatgctttaaacgcccggctcctggtgcagccgtttacatgccgtaccgtcttcacggaacaggtggcaacgatgaggcggcaggccgatggcgaatgtggcaccttcttctaccagcaccacgtcgttctggcggtacaccaggttttgacggatggccgggatttggatgtggatttgcgtctcgttgccgagctgctccaccacctgtacgtcgccggtaagccgcacttcagaggcttcgccgggcagcaaatgttcggggcgaatgcccagtgacagattggcgccgggctgaacgcccgcgccttccaccggcagccagaccagttgacggttgggcagttcgacctgcacctgttgcggctgcgcagcggtcaccttgaccggcaggaagttcatcttcggcgagccgataaacccggcgacgaagcggttggccgggtagtggtacagttccagcggcttgccgacctgcgccacgcgaccggcgtcgagcaccacgatcttgtcggccagcgtcatcgcttcgacctgatcgtgagtgacgtaaatcatggtgcgctgcaggcgcttgtgcagacgggagatctcgatgcgcatctgcacccgcagcgcggcatcgaggttggacagcggttcgtcgagcagaaacacgtccggctcggccaccagcgtgcggccgatcgccacgcgctgacgctgaccgccggacagcgccttcggccgccgatcgagcaggtgcgccagctgcagcacctcggagacctggttcacccgttgattgatttccgctttcctggcgccggccagcttcaggccgaacgacatgttgtccgccaccgacaggtgcggatacagcgcgtaggactggaacaccatgccgatgccgcgctcggaaggcggcacctcattcatccgtttctcgccgatcagcaggtcaccggaggtgatgtcctccagcccggcgatcatgcgcagcagcgtcgatttgccgcagcccgacggcccgacaaacaccacaaactcgccgtcttcgatggtcagattgacgtctttggaaatcacggcctcaccgaaggccttataaacgctgcgcagtgtcacgctagccatgcgttactcccctgctttcgcagttaacatgtcgtgtgaaaatggcggaggcaaagcccgccaaaacccattgatgaccctcttgctgcgcgccgtgctgccatgccaacggcaaggtcgcctcagacggcgcggccgcctgagtataaggctgcaggtttatcagcgcttcaaggcattgatcctgatgggtaataagtaagcgcaccacgccgtcccgctggctgaccgcgttcagctcgccgcgctggatgagcggcgaacggcgcagggccaacagcgcctggcagtaacgtaaggtggagtggctgtcgtgctgttggcggctgatggccaatgcgcggtgttcgatcgccacctgctgataccagctgatctccccggcggtgacctgttcgggggcttcatgccacggcatcggcgtttgcgcgccgcgcggatcctgcaggccggcggcatgcggcagccccagctcttcgccctgatacaggcagatcggcgccggcaacatcgccaacagcgtcaaaaaggcggcggcggaacgcagatcgccttgcccccagcggctgaccactcttggctgctcggcgtccccggtgctccacaggctgtccgctaacgtggcgcggcgggcgtgcaacaccgccgccagcttctccgcgctgaacggcatcacgtccagcgccagcgcgccgtgggcgaaccgctgcggcgcgacggcattgcgaacgcggttggcttcatcgccgtaccacagcgtcagcccttcgcccgtcaccgtcgcctcggcctccggcgccagcgtctgcggcagcagcaggccgtcgatcgacagcgctttcaggtacggcagcgccgcaagcatgccgtgtgcgtcgcccacgccgtccccgtttccgtcacggaaactggccggatggatccggtacagggtgggctgagtggcgataggcattgacgacataaatccggtatccctgctgcgcgtggcgttaaaaatcgatgtgccgatagtgcgggagtcaccggaaagggtaatcatccgtaacaggatttttcatgggggaggaggcgggaggatgagagaacgaccgcggcgatgagaagttccgcgcttaaggcaaatctgtgatccggctggcaaaaatcgcccccctattgtgtgcctgacgccacagaatagagcacaacgttaactggatcacactcctcatctcaggggcgtagagggggggaggatgagaatatgtcgcgttgtgacccactattaccgcgaaacgtctctccttgatttatgtgcccacaaaaagaaggactggattatgactcgcagcattaccctcgcccgcacgctggcgctctcggcactggccaccctggtgctctcttcttccgccttcgccaagattgaggaaggcaaactggttatctggatcaacggcgacaagggctataacggcctggcggaagtcggcaagaaattcgaaaaagacaccggcatcaaggtcaccgtcgagcacccggacaaactggaagaaaaatatccgcaggtggccgccaccggcgacggtcctgacatcattttctgggcccacgaccgcttcggcggctatgcgcagtccggcctgttggccgaaatccacccgtccaaagccttccaggacaagctgttcccgttcacctgggacgccgtgcgctatgacggcaagctgatcggctacccgatcgccgtcgaagcgctgtcgctgatttacaacaaggacttggtcaaacagccgccgaagacctgggaagagatcccggcgctggacaaacagctgcgcgccgccggcaagagcgccatcatgtggaacctgcaggaaccctacttcacctggcctatcatcgccgccgacggcggttatgccttcaagtatgagaacggcaaatacaacatcaaggatgtcggcgtcgccaacgccggttcgcaggccggcctgcagttcatcgtcgatctggtgaaaaacaaacacatcaacgccgataccgattactcgatcgccgaggccgcgttcaacaaaggccaggccgcgatgaccatcaacggcccgtgggcctggaacaacatcgagcagagcaaaatcaactacggcgtgacgctgctgccgaccttcaaaggcaaaccgtccaaaccgttcgtcggcgtgctgaccgccggtatcaacgccgccagcccgaataaagaactggcgaccgagttcctcgagaactatctgctgaccaacgaagggctggcggacgtcaacaaagataaaccgctgggcgcggtggcgctgaagtcctaccaggaaacgctggccaaagatccgaagatcgccgccaccatgcagaactcgcaaaacggggagattatgccgaacatcccgcagatgagcgccttctggtacgccgaacgcagtgcagtgatcaacgccgtcagcggccgtcagacggtgaaagccgcgctggacgacgtgcagacccgcatcaccaagtaacgacgtcgtgcggggtgccgtggcgccccgccattgcttcacagaaaggaacgccctatgcaattcgctcacgccgggacgcctgcgcgtaaaaaatcgaagtggtggcaaagcgacgcgctgaaatggctgttggtcggcctgttcagcctggtgacctgctacctgattgtgttgatgtatgcacagggtgaatacctgttcgccatcctgacgctgatcctggtcagcgccggactttacgtcttcgccaaccgccgcgcctacgcttggcgctatgtgtatcccggcgtcgccggcatgggactgttcgtcctgttcccgctgatctgcaccatcgccatcgcctttaccaactacagcagcaccaaccagctgacctttgagcgcgcgcaatcggtgctgatgcaacgccagttccagagcggcaaaaccttcaccttcggcctctacccggcggaaaatcagcaatggcgcctgcaattaacctcgccggacagtgaacagccgttgatttccgagcctttccgcctcgacgccgctgcgccgcaaaccctgacattgaccacgcagagcgccgcgccgcagggcgaacgcgccacgctgcgagtgatcacccaaaaccggcaagcgctgagccagctggtggcgcaactgcccgacggcggtgaattgcgcatgagctctcttcgccaattctccggcacccgcccgctgtatgcgttggaccaagacggcagcacgctgaccaataaccagacccaggtgcgctatcggccgaacggcgacatcggcttctatcaggcgatcaacgccgacggcggctgggcgcaggaaaccctgagccccggctataccgtcaccaccggctggaaaaacttcctgcgggtgctgcaggacgaaggcatcaagaaaccgttcgtgtcgatcttcatctggaccatcgtgttctcggtaatgacggtgatcctcaccgtggcggtcggcatggtgttggcctgcgtggtgcagtgggaggcgctgaaaggcaaggcgatctaccgcgtgctgctgatcctgccctatgcggtgccgtcgttcatctcgatcctgatcttcaaagggttgttcaaccagagcttcggcgaaatcaacatgatgctcagccatctgttcggcatcaaacccgcctggttcagcgatccgctcaccgccaagagcatgatcctgatcgtcaatacctggctcggctacccgtacatgatgatcctgtgcatggggctgctgaaagcgatcccggacgatctgtacgaggcctcggcgatggatggcgccaacccgtggcaaaacttcttccgcatcaccttgccgctgctgatcaagccgctgacgccgctgatgatcgccagcttcgccttcaactttaacaacttcgtgctgatccagctgctgaccaacggcggcccggacatgatcggcaccaccacgccggccggctataccgatctgctggtcagctacacctaccgcatcgccttcgaaggcggcggcgggcaagacttcggcctggcggccgccatcgccacgctgatcttcctgctggtgggcgcgctggcgatcctgaatttgaaagccagcaagatgaacttcgattagggagaataacgatggccatggttcaacccaaatcccagcgcttgcgcctgtggatcacccatatcttgatgctgtgctttatcgccctgatcatgtttccgctgctgatggtggtggccatctcgctgcgcgccggcaacttcgccaccggcagcctgataccggaaaccctctcttgggatcactggcggctggcgctcggcttcagcgtcacccacgccgacggcagcgtgacgccgccgccgttcccggtgctgctgtggctgtggaactcagtcaagatcgcggcgatcaccgccatcggcatcgtgacgctgtccaccacctgcgcctacgccttcgcccgcatgcgttttcgcggcaagagcacgctgttgaaaagcatgctgatattccagatgttcccggcggtgctgtcgctggtggcgctgtacgccctgttcgaccgcctgggccagtacattccgtttatcggcctgaacacccacggcggcgtgattttcgcctacatgggcggcattgcgctgcacgtctggactatcaaaggctatttcgaaaccatcgacaattcgctggaagaagcggcggcgctggatggcgccacgccgtggcaggcgttccgtctggtgctgttgccgctgtcggtgccaattctggcggtggtgttcattctgtcgtttattgccgccatcaccgaggtgccggtggcgtcgctgctgctgcgcgatgtgaacagctacacgctggcggtggggatgcagcaatatctcaacccgcagaactacctgtggggcgacttcgccgctgctgcggtgctgtcggcgataccgattaccgccgtgttcctgctggcgcagcgctggctggtgggcggcctgacggccggcggcgtgaaggggtaatttgtgccactgcagtgcgtttgatgtttttccgcgatagcggtaatcctgtgtctttggcggcctttggccgccatttttatctccgctattcccgtttcagccggtcggtgttggccagatagagcgtcaccaccagcaccaatatcgccgccgcgtagatcagggtgtcgatgggatttttgtgatccacgataatcaaacgaataatcgcggtaatgccgatataaataaaataacgcagcgggaaatgataacccgactcaaaatacttgacgatcaaggcgataaattcaaagtacagaaaataaatcacgatgccttcaatcaacaggtaagaggacgactcttcgctattaataaataacaccttcgccagatggatggtctccttgaccagaaacaccaccagaattgccgccagcagcaacaagcccacgttcagcacccgctgcagccccttcgctatcatgatcgaacgcgacgtttttgccataaaacctctcctgaataccgcttatatgattcaaccgtgccaatataggcattgtcctaaaaattccgcccttcgcgaaagcactttaaaccccatttaattcatcacgttataataagatgtttctggcttatagatttgtagcaaatcgaaatgtcaactatcatgggtcacagagatctttacataaaaccaataacctcgaattaacaagggaattctttatgcgcgctaaacttaacggactggtcgctgcaggcctgtttacctgtgcattgtccggccacgccgccggcctggtagcccctgacaacgatctgcgtaacgatctcgcctggttgtctgaccgcggcgtcatcaacgtcagcctgtccacttggccgctgagtcaggaagagatcagttccgttatcgcgcaggccaagccggtgaccaacaccgagaaaaacgtcatcgaccgcgtgcaacgccgcgtcgatgccctgaaagccaacatccgcgtcagcggttacgcgtcgaccgataaacctggcaccccgcaaggcttcggccaaaacgagtacgccgacgatcgcctgaccatcggcgccggcgccaacggcgagttctgggacgtgcgtctgcagggctcggtggaaggcgatcaacgtgtcagcgacggttccaaattcaacatgaacggctcctacggcgcagtgaaaatctggaaccaatggctctccttcggcgaggtttcccagtggtggggcccgggttacgacggcagcctgatccgctccgacgccgcgcgcccggtcgcgggctttatgctgcagcgcgccgaccaatcgccgtttgaaaccccgtggctgtcgtggatcggccgctggcaatatcaattgtccgccggccagctgtcgcagtacagttctgtaccgcacaccaaactgatcggtggccgtttcaccatgatgccgaccgacttcctggaactgggcgcttcacgcatcatgatgtggggtggcgagggccgaccgcagtcgtggagctcgttctgggacggcttcaccggtaaagataacgatgattcaggtaaaggcaacgatccgggcaaccagctcgccggtttcgatttcaaactgaaaatgcagccgctgatcggcctgccggttagcctgtatggtcaattggtgggtgaagatgaggcaggttatctgccatcgcaaaacacctatctgctcggtttggaaggccacccggaatggggcccgaccaccgttaactggtatatcgaagggtcagacacccgttcggatatgagccgcaaaaactatgtgtacacacactatacctacaaaggcggctactaccagcagggttacccgctgggccacgccatgggcggcgacggccagatgctgtccggccgcgtagagctggtgctggacgacagccagcgctggagcacccgcgtggtttacgccaaggtgaacccgctgagccaaagcatcaaccaggcgttcccgaaatccgatacgctgaagggcgtccaggtcggttggggttacaccttcccgtcccaggttaagttcgataccagcctgtggtacaccgacaacgatcacagcaccgccgacgacgtgggcgccggcgtcagcttcgaagtgccgatcaatctgtaatttgttacagacgtaaaaaaacccgccgcggcgggttttttattggcttcagctcaggcgcttagcgccattccttgaagcggttgatcagcgcattggtcgagctgtcatggctgctgattttctcgctgcccgccagctccggcaggatgcggttagccagctgtttgcccagctccacgccccactgatcgaaggtgaagatgttcaggatcgcgccctgggtgaagatcttgtgctcgtacagcgcgatcaggctacccaggctgaacggggtgatttcacgcagcaggatcgagttggtcggcctgttgccttcaaacaccttgaacggcgccacgtgcttgacctgctcaggggttttgccctgctccgcgaactcggcttccaccacttccagcgacttgccaaacgccagcgcttcggtctgagcgaagaagttggacaacagtttggcgtgatgatcgcccagcgggttatggctgatggccggcgcgatgaaatcgcacggcaccagcttggtgccctggtggatcaactgatagaaagcatgctggccgttggtgcccggctcaccccaaatgatggggccagtctggtaatccaccgggttgccgttgcgatcgacgtacttgccgttggattccatgttgccctgctggaagtaagcggcaaaacggtgcatgtactgatcgtacggcagaatggcttcggtttcggcgccgaagaagttgttgtaccaaataccgatcagcgccagcagcaccggcaggtttttctccgccggcgtctcggcgaagtgcttgtccatagcgtgcgcgccgctcagcagctgctcaaagttgtcataaccgatggacagcgcgatcgacaggccgatcgccgaccacagggagtaacggccaccgacccagtcccagaattcgaacatgttgtcggtatcgatgccgaactcggctaccgctttgccgttggtggacagcgcggcgaagtgcttggccacgtgctgttgatcggcggcgctgctcaggaaccagtcacgcgcgctgtgggcgttggtcatggtttcctgagtggtgaaggttttggaggccaccaggaacagcgtggtttccggattcagcggctgcagcgtttcggcgatgtgggtgccgtcgacgttggagacgaagtgcatgttcaggtggtttttataagggcgcagcgcttcggtcaccatgtaagggccgagatccgaaccgccgatgccgatgttcaccacgtcggtgatcggcttgccggtgtagcctttccactcgccgccgatgacgcgcgcgcagaactgtttgatcttggccaataccgcgttcacttccggcatcacgtctttgccgtcgaccaggatcgggctgttgctgcggttgcgcagggcaatgtgcagcaccgcgcgatcttcggtgcggttgatcttctcaccggcgaacatcgatttgatggcgccttgcagatcggtttctttcgccaacgcctgcagcttctccagggtttcctgcgtgatgcggttcttggaatagtccaccaacatttgatcgttgaaggtcgcggagaacctggagaaacgatcgctgtcctcggcgaacaggtcggcgatccgtacgtctttcatctgtgcataatgttgctgcagggcttgccaagcagcggtttgactaggattgatatttttcatagcaacactcttaggcttgagaataaaaatgacgcgtttgtccgattgtagcctgttcgactgtgattatgatcgcttttcttgcgataggcgctaactgtcaacgcattgccgcctcgtttcagctttcactctatacttttggctaacggcctgttatcggggttgccgaattgtcatcaggctgtgtcatcgtcgtttatttcgtcatttgaaagggatctcgcttatggaattatccgccccgctcatgttggtgcttatcggcctggcgtcgctgctggcgcagtggctggcctggttgctgcgcctgccggccatcttgccgctgctgctgttcggcatcgtgctcggcccgacggtgcatctggtacagccggatctgctgttcggcgatctgctgtttccgctggtgtcgctgtcggtagcgatcatcctgttcgagggggcgctgacgctgcgcttcgaggagatacgcggcctcggcggcgtggtgcgcaacctggtcaccgtcggcatgctggtcacctttctggtcatcagcctcgccagttggtggctgctggatttcccgccggagctggcggcgttgatcggcgcggtgacggtggtgaccgggccgacggtaatcgccccgctgatgcgcgtggtgcggccgaacgccaacattaaccaggtgctgcgctgggaagggatcgtcatcgatccggtcggcgccatcttcaccctgctggtgttcgagttcatcgtgctgaagcagaatgcggaatcctatacccacctcttttggacgctgggcgtgaccgccgccgtcggcctgatcgccggcgcgctgttcggttacctgctcggcctggcgctgcgccgcgtctggctgccgcgctacctgcagaacctggcggtgctggctattatgctgaccgccttcggcgtttccaacgccatcgccgacgaatccggtttgctgaccgtcacggtgatgggcatctggctggccaacatgcgcgacgtggacaccagcgatattctggcgttcaaagaggagctgtcggcgatcctgatctcggcgctgttcatcattctggcggcgcggctcgacatccaggcgctgtggaacatgggctggccgctgctgctgctgctgctggcggtgcagttcatcgcccggccgctgtgtatcgcggtgtcgacctggcgctcttccctgcactggcgcgatcggctgctgctgtgctggatcgccccgcgcggcatcgtggccgcggcggtcagctcgctgttcgcgctgacgctgcagcgcagcggctatcagggcgccgaccggctggtgaccgtggtgttcgccatcatcatcggcaccgtggtgttgcaaagcctgaccagcggcataatggcgcgctggctgcgggtgcagcagcagaaaccgcgcggcgtgctgatcgtcggcgccaacagcgtggcgcgcatgctggcgcaggcgctgatcaagctgaacgtgccggtgatcgtcaccgacagcagctgggaatactaccgtcaggcgcgcatggacggcattccggcctactatggccacgcctactccgaacacgccgagaactacctcgatctgagcaatatcgcccaggtgctggcgctgtcgcccaatcgccaccagaacgcgctggcggtctaccacttcggccatctcttcggcgaagatcacgtgttcgccatccgttcgggggcgccgttgaaagggcgcggcgccagcgcggaaagttcgcgtttccgccggcatgaaattttatttaatcaggaagccacctacggccgcctgagcagcctgctcgccaggggggccaccatcaaagcgaccaaattgaacgaaaatttcggttggctggagtatttggagaaacatcagggcgttattccgctattcagccaaaaggaagacggttctctgcaaccgattggcgccggttccacgcccgcgatgccctgtacgcttatcgcgctggtgcaagatgaaaatccctcaccgtctgtacgttgacagaatggcgataaccggctattcctaacagcctacttgcgcacccggtgcgcaagccagaagaggcgcgtcgcccaggtagagtgtcagaggagccgtttctccgttgacggcacccgagggggagcgacgccgaggtagggtaatggccggccattatcgtatcgactacaggggctgaatcccctgggttgtcaccaggggatcgcccgcagggcgatcgacaaggtggggcgcttctgggtgtatcgtagcctgacctctacgcctgccccctgtttaccgctctccccttgtgccaaggctatggaattacagtgccccaaacgggcatccctgacacgaggtttctagatgaaccaagcagcaccccagaattccaccgtggtagccaagttcggcggcaccagcgtcgccgactttgaagccatgaaccgcagtgccgacgtcgtgctggccaacccgcaggtccgcctggtggtgttgtccgcttcggcgggcgtcaccaacctgttggtcgccctggccgagggttgcgaggccgacaagcgcaattaccagcttgatgaaatccggcgtatccaatacgccatcctcgatcgcctcgcggcgccggcggtgatccgcgacgaaatagaccgcctgctggaaaacatcgccatgctgtcggaagccgcgtcgctggccacctcgacggcgttgaccgacgaactggtcagccatggggagctgatgtccaccctgctgttcgttgaaatcctgcgcgcccgcaacgtgcaggccgaatggttcgacgtgcgcaaagtgatgcgcaccgacgatcacttcggccgcgccgtgccggacagcgccgcgctcagcgaactggcccgggcgcagttgcagccgcgcctgcaggaagcgctggtggtcacccagggctttatcggcagcgagccgaagggccgcaccaccacgctcggccgcggcggcagcgactataccgccgcgctgctcggcgaagcgctcggcgtcggccgggtggatatctggaccgacgtgccgggcatctacaccaccgatccgcgcgtggtgccggcggccaagcgcatcgacaaaatcggtttcgaagaggcggcggaaatggccaccttcggcgctaaagtgctgcatccggccaccctgttgccggcggtgcgcagcgatattccggtgttcgtcggctccagcaaggatccggcggccggcggcacgctggtgtgcaacaccaccgagaacccgccgctgttccgcgcgctggcgctgcgccgcaagcaaacgctgctgacgctgcacagcctgaacatgctgcacgcgcgcggtttcctggccgaggtgttcaacatcctggcgcgccataatgtctccgtcgatctgatcaccacttcggaagtcagcatcgcgctgaccatggacaccaccggcgccacctccgtcggcggtagcctgctgaccacctcactgctgaccgaactgtcgtcgctgtgccgggtggaagtggaagaaaacctggcgctggtggcgatcatcggcaaccagctgtcgcgcgcctgcggcgtgggcaaagaggtgttcggcgtgctcgatccgttcaatatccgcctgatctgctacggcgccagcagctataacctgtgcttcctggtgccgggcgaagaagccgagcaggtggtgcgtaccctgcatcacaacctgttcgaataagtcattatccctgattgcgggcgcagcatgctgcgcccctgcgtctaaaaaatccgttcaaaacctgcaggggttcagcatgttgagcccgcaataaaaacacaaccacatccaccgttctcaatctggctaaggaaaacctgcatgctggcactactcacgcgcttattccccctctgggcgatactgctgtccgtcgccgcttattacacgccgaccacctttaccggtatcggcccctacgtcagcccgctgctgatgctgatcatgttcgccatgggcgtcacgctgcggctcgacgacttcaaacgcgtgctggcgcgccccggcccggtggcggcaggcatcttcctgcattatctgatcatgccgctggcggcctggatcctggcgatgctgttccgcatgccgccggctctgtccgccggcatggtgctggtgggcagcgtggccagcggcaccgcctccaacgtgatgatctatctggccaagggtgacgtggcgctgtcggtgaccatctcggcggtctcgacgctggtgggggtgttcgccacgccgctgctgacccgtctgtacgtcgacgccaagatcagcgtcgatatcatgggcatgctgttgagcattctgcagattgtggtgatcccgatcggcctgggcctgatcgtccaccataccctgaccaaggtggtgaaacgcatcgagccactgttgccggcgttgtcgatggtgtgcattctggcgatcatcagcgcggtggtggcgggcagccaaagccatatcgcttcggtcggcctggtcgttatcatcgcggtgatcctgcacaacggcatcggtctgctgagcggctactggggcggtaaactgttcggtttcgacgagtccacctgccgcacgctggcgatcgaagtcggtatgcagaactccgggttggcggccacgctgggcaaaatctacttctcgccgctggccgcgctgccaggcgcgttgttctcggtctggcacaacctctccggttcgctgctggcaggttattggtccggccgccctatcaagaagaaataaaccgcctgtagggacgcaaacaattgcgtcccttttctttcctgcgaaatttcgtatttcccactggtcggattgtcataattcccctcatcccctatcatccgtgaaaaataaaaattcagattcttcctatcaatgccgataatgttggcaagaggaagagacgctccactttttttaattaattaagtcaccagggttgcccgccataaaagaagcagcctaattattatttagatatatacccaccgtcttatttgctgcggcaaatcaagatacctcgcaatgtgcatgtcgctcattatttcgggccggccgtcggccgcccgtggttaacctcatggattgggctggctgccccggcggcctctcagaatggattacaatgataaaaaaaatcaccgccttgatactgctggtcagcacggccctttccgccgaaaccctgccggactcccacatgatgatggacatgtcgatgggggaatcacggcgcgcgttgcaagacagcacgcgtgaagtcaaccagttgattgagcaacgccgctaccagcagctgaagcaacagcgcctgctggcggaaccggaaccggccgcgcccgcactgccgcagtccgcgcagtgcctgccgatcgccggcgtttatctgcaaggcattaccctgctctcaccgggtgatttatctgcgctgagcgcgctgccggaaaactgcatcagcagcaacgatatcaatcgcttgacccgtgaattaacgcgcctttatgtgcaaaagggctatatcaccgcgcgcgtgcaaattgttcgccctaattcacaaggagaattggggttaagcgtgacggaaggatttatcgagaaaatagaaggcggcgatcgctgggtcaacagccgtttattatttccggggctggaaggcaagccgttgaaattaaccgagctcgatcagggattggatcaggccaatcgtttgcaatcaaataccaccaagctggatatattgcccggccgccaggttggcggttcggttattcgtttgcgcaatcagcatgccaagccctggctgattaccgccggcacggataattacggccaaaaaagcaccggccggtggctggcgcgcgccactgccacgttggacagcccgtttggcctgtcggactttgtcagcctgaacgccaacagcacgctggaaaacccggctcaccgctacaatcgcgcctacaccctgctctattcgctgccgtacggcgcgttcaccttcagcgggttcgccagcttctcgtcctatgagaaccaccagcagctgccgcacaacgtggtcaaactgcacggtcagacccaacagtacgggctgcgcagcgactacgtgttttatcgcgaccacgatcagatagacagcttgagcggccagctgacctacaagcgcatcgacaactacttcgaaagcgtgcgtcttgaggtcagcagcccaacgctgaccctggccgagctgagcgccagccacctgcaaattctgcccaatggcgtgttcagcgccaacctcagcgtcgagcagggcctgccctggctgggcgccgatcgccacccgagttcggtgcacctcgacagccagttcaccaagggcaagctgttcgccaacctgagccagcgcctccagctgggtggcgccacctatcagctcaacaatctgttctacggccagtacagccgcgacccgctgcccggcgtggagtggcttagcctcaccgatcgcagcgccgtacgcggctttagccgcagcacccagtccggcgacaacggctggtatctgcaaaatacgctgtcccgcagtttcaatctgggcgccaccacgctgacgccgcgccttggcgccgacgttggccgcattctgccgcgtcaggacaactcgggctggcgcagcagcgccggggtgagcagcggcgccacgttacgctaccggcaggcgctggtcgatctcgaggtcagccgcggctggattttgtctaaccacgccacgcctgaagatcccgttcaggtgttggcccgcttttcttacaccttttaatcaacagttttgcaggaccccacggcaatatacggagatacatggatgaaaaataataacttcagactttcggcggcaggcaaactggccgccgcgctggcgattattctcgccgcttccgccggcgcctacgccgcagagatcgtcgcggccaacggcgccaacggccccggcgtctccaccgccgccaccggcgcacaggtggtcgatatcgtcgcgccgaacggcaacgggctgtcgcacaaccaatatcaggacttcaacgtcaaccagcccggcgcggtgctgaacaactcccgcgaggcggggctgtcgcagctggccggccaactgggcgccaaccccaatctgggcggacgcgaagccagcgtgatcctcaacgaggtgatcggccgtaacccgtcgctactgcatggccagcaagagatcttcggcatggcggccgactacgtgctggccaacccgaacggcatcagctgtcagggctgcggattcatcaataccagccattcctcactggtggtcggcaacccgctggtggaaaacggcgtgctgcagggttacagcaccttcggcaaccgcaacacgctgagcctcaatggcaccctgaacgccggcggcgtactggatctgatcgcgccgaagatcgacagccgcggcgaagtgatcgtgcaagatttcaaacattcgaatggtaaagtgacctcggcgacgatcaacgccatcagcggccttaaccgggtagcgcgcgacggcacggtgcaggccagccaacagacgccgaccgcgctggacagctactacctcggcagcatgcaggccgggcgcatcaacatcatcaacaccgcgcagggcagcggcgtgaaactggccggctcgttgaacgccggcgatgaactcaaggtgaaagcctatgatatccgcagcgaaagccgcgtcgacgacgccagcagcaacaaaaacggcggcgataactatcaaaattaccgtggcggcatctacgtcaacgatcgcagcagcagccagaagctgacccgcaccgagctgaaaggcaagaacatcagcctggtggcggataatcatgcgcacctcaccgccaccgatatccgcggcgaagacattacgctgcagggcggtaagctgacgctcgacggccagcagctgaagcagacgcaaggccataccgacgatcgctggttctactcctggcaatacgacgtcacccgcgaacgcgagcagctgcagcaggcgggcagcaccgtcgccgccaacggcagcgccaaactcatcagcacccaggaagacgtgaagctgctgggcgccaatgtcagcgccgagcgtgcgctgagcgtcaaagcggcgcgcgacgtacaccttgccgggctggtggagaaggataaatccagcgagcgcggctaccagcgcaatcacacctccagcctgcgcaccggcagatggagcagcagcgacgaaagcgaaagcctgaaggccagcgaactgcgcagccagggcgaactgacgttgaaagccggtcgcaatgtctcgactcagggcgccaagatccatgcccagcgcgatctgacgatcgatgcagacagccagatccaggtcggggtgcagaaaaccgccaacgccaaagcggtacgcgatgacaaaacctcctggggcggcatcggcggcggcgacaacaaaaacaacagcaatcgccgcgagatcagccacgcttccgagctgaccagcggcggcaccctgcgcctgaacggccagcaaggcgtcaccattaccggcagcaaggcgcgcggccagaaaggcggcgaagtcaccgccacccacggcggcctgcgcatcgacaacgcgctgagcaccaccgtggacaaaatcgacgcgcgcaccggcaccgccttcaacatcaccagcagttcgcacaaggccgacaacagctaccagagcagcaccgccagcgagctgaagtccgacaccaacctgacgctggtcagccacaaggatgccgacgtgatcggcagccaggtcgccagcggcggtgagctgagcgtcgagtcgaagaccggcaacatcaacgtcaaggcggccgagcggcagcagaacatcgacgagcagaagaccgcgctcaccgttaacggctacgcgaaagaagccggtgacaagcagtaccgcgccggtttgcgcatcgagcacacccgcgacagcgagaaaaccacccgcaccgagaatagcgcctcaagcctcagcggcggcagcgtgaagctcaaggcggagaaggacgtgaccttcagcggttctcaattggtcgccgacaaaggcgacgccagcgtcagcggcaacaaggtttcgttcctggcggccgacgacaaaacggcctcaaacaccgagcaaaccaagatcggcggcggtttctattacaccggcggcatcgacaaactcggcagcggcgtggaagccggctacgagaacagcaaaacccagacgcaaagcagcaaggcgatcacctccggcagcgacgtcaaaggcaatctgacgatcaacgcccgcgacaagctgacccagcaaggcgcgcagcacagcgtcggcggcgcctatcaagaaaacgccgccggcgtcgatcaccttgccgctgccgacaccgccagcaccaccaccaccaaaaccgacgtcggcgtgaacatcggcgccaacgtcgattacagcgccgtgacccgtccggtcgagcgcgcggtcggcaaggcagccaagctggacgctaccggcgttatcaacgacatcggcggcatcggcgcgcctaacgtcggcctggatatcggcgcacagggcggcagcagcgaaaaacacagcagcagctcgcaggcggtggtcagctcggtgaaagccggcagcatcgacatcaatgccaaaggcgaagtgcgcgatcagggcacgcagtaccaggcgagcaaaggcgcggtcaacctgacggcggacagccaccgcagcgaagccgcggcaaaccgtcaggacgagcagagccgcgacacccacggcagcgccggcgtgcgcatctacaccaccaccggcagcgatctgaccgtggacgccaagggcgaaggcggcacccagcgcagcaacagcagcgccagccaggcggtggccggctcgatcgacgcggccaacggcatcaacgtcaacgtgaaaaaagacgcggtctatcagggtaccgcgctgaacggcggcagcggtaaaaccgccgtcaacgccggcggcgatatccgcttcgatcaggccagcgacaaacagagcgagaaccacagcggctttaacgtcaaagcgtccgccaaaggcggcttcaccgccgacagcaaaaacttcggcgccggtttcggcggcggcaccaacaacggtgaaagcagcagcagcaccgcgcaggtcggcaacgtcaacggccagggtgtggcgctgaaggcgggccgcgatctgacgctgcagggcaccaacgtcaagagccagggcgacgtcagcctgaacgcgggcaacaaggtcgcgctgcaggcggcggaatcgacccaaacgcgtaaggaaagcaagctgtccggcaatatcgatctgggcgccggcagcagcgacagcaaggaaaaaaccggcggcagcctctccgccggcggcgccttcgacatcgccaaggtcaatgagtccacgaccgagcgccagggtgccactatcgcctcagacggcaaggtcaccctgtccgccaacggcaaaggcgatgacgcgctgcatctgcagggggccaaagtcagcggcggcagcgccgcgctcgaagcgaaaaacggcggcatcctgctggaatccgccaagaacgagcagcataaggacaactggaatctgggcatcaaagccaacgccagaggcggtcaaaccttcaacaaggacgcaggcggcaaggtcgatccgaacactggcaaagacacccacacgctgggcgcaggtctgaaagtcggcgtggagcagcaggataaaaccacccacgccaataccggcatcaccgcgggcgacgtggcgctcaacagcggcaaagacacccgccttgccggcgcgcgcgtcgacgccgacagcgtacagggcaaggtgggcggcgatctgcgcgttgaaagccgcaaagacgtcgagacaggcgtgaaggtggatgtggatgccggtctgagccacagcaacgatccgggcagtagcatcacctccaagctgtcgaaggtcggcacgccgcgctacgccggtaaagtgaaagagaaactggaagccggggtgaacaaagtggccgacgccaccaccgacaagtacaacagcgtggcgcgtcgcctcgatccgcagcaggataccaccggtgcagtcagcttcagcaaggctgacggcaaagtcacgctgccggaaacgccggccggcgaaaaaccgcagggcccactgtgggatcgcggcgcacgcaccgtcggcggcgcggtgaaagacagcatcaccgggccggcgggtcgccaggggcagctcaaggtcaatgccgacgtggtgaacaacaatgcggttggcgagcagtcggcgattaccggtaagcacggcgtggcgctgcaggtcggcggccaaacccagctgaccggcggcgaaatccgcagccagcagggcaaggtggaactgggcggtagccaggtcagccagcaggacgtcagcggccagcgttatcagggcggcggccgcgtcgatgcggccgccacggtaggcggactgttaggcggcgcggcgaagcaaagcgtcgacggcaacgtgccgttcgccagcggccatgcctcaactcagcaggcggacgccaaagccggcgtgttcagcggcaaataacgctctcccctacgcaacgcccccggttttccgggggcgtttttttttacagcgtgcttggggtgtcttcccagtcgcgatcgtcgtctttcgcatcctgatccaacacgttgtaggccacggcgcaaaacagcgagttcaggcgcttcatgtcccccaacaatcccaaatgcagcgaactggtctcgatgctctgcacgttttgctgatgcaaacgatcgacgtgcgcgtgcgcatagcggcgatccagaatgcggaagcggtgcttggaacgacgcaggcgtttggcgctggtgacgtcgccggacaggaacaccgacagccccagacgcaggttgccgatcagccgttcgtgcagcccgtccagttccgccaatccttccgccgagaaggcgcggcgcgcggcgtgcgatttggcgcccacgtcgccggccatgcgctcgatgatgtcgcccgcctgttccaggttgagcgccatttcgatgatttccgcccagcggcgcgaatcttcctcgcccagatcttccttctggatctgcgccagatacagcttgatggcggtgtacagcacgtcgacgtcatcgtcgagtcgccgcacctctttatccacgccttgcttaccgtgcagcacttcgcgctgcaggatcatcatgtgttccaccacgtcgcccatgcgcaacgtttcgcgcgccgcgttggccagcgccagcgtcggcgtatccagcgcgctggcgtccagatgacgcggccgcatgcgcgggtcgtcggccgccacgtcgacgatcagccgttcgcacagcgtcgccatcggcccggccagcgggatcatcaccagacaacggatcaggttgtagaacacgtggaaatagatcaccagctcttcgctgccgcccggcagttgagccatcacatccgccagataggagacgaacggcaacaccaggatgcagcccaccaatttgaacagcaggctgccgagcgccacgcgccgcccggcggcgttctggccgctggcgttgatcatcgccagcaggccgctgccgaggttggcgccgatcaccagacagagcgccaccttcagcgaaatcacgccggtggcggtcagggtggcggtcagcagcaccgcggccaggctggaatagctgacgatggcgaacagcgcgccggtcagggcgtccagcatcacatcgccggtcagcgacgagaacagcactttcaccccggccgcctgggtgatcggcgtggcggcggccacgatcagttccagcgccagcacgatcagccccagaccgatcagaacgcgtccgatctggccgatccgcatctgtttgcggctgaggaacaggaagacaccgaccaggatcagcagcggcgacagccaggaaagatcgaaggtcagcacgcgcgccatcagcgcggtgccgacgtcggcgcccagcatgatcaccagcgcaggcgccagccccaccagcccctgcgcgacgaaagaggtcaccagcagcgcggtggcgttgctgctttgcaccagcgcggtcacgccgatgccggaaacgaacgccagcggttttttctcaacgctgtcgcttaacacgcgccgcagattggcgccataaacccgcataatcccggtgcgcacgatgtgggtgccccacaccaacagcgccacggacgaaagcaggtgaagaagggtcagcacggaagatacgctccattaacgcccggccaaaggaggctgatacccgatgcctgtcacgcgaagcacagaggcgagccaaaggatgacgggtacagcgcgcggtcccgcctgccgggcgtgggtctggcaggacagcgggcgggcggcagaccgcagaagagaagggttaaggcggcggtgggagagccccggcgccgcgctgcgaagtcatgcaacttcccgcaatacaacaggttccaagtgtagcccaatttccgcgccgtcgggccgcagatcggccaccgaacggttgagcacgtcaaccagcaactctacctcgcgaacctgaatccgatagcgtaccacattcccgagcaaactgtggccaaggatcaccccgccgatcccctgtccggccggcaacagcccgatagactctgggcggatcgccaccttgccggcatagctgcgcccggtcagccggccggcctgttcggcgctcagcaggttatagttgccgataaaaccggcggcgaaggcgtccgccggctgggtatacagggtttccgcatcaccgctctgcacgatctgccccttgttcatcagtacgatgcgatccgacagggtcagcgcctcttcctgatcgtgggtgacgaagatcgccgtcaggttcagctcgcgttgaatgcgccggatctgctcgcgcagatgtttgcggatgcgcgcgtccagcgccgacagcggttcgtcgagcagcagcagacgcgggcgcgtgaccagcgatcgcgccagcgccacgcgctgacactggccgcccgacagctgatgcggataacgcttcgccagatcgctcagctccaccagcgccagcgcctcctgcacccgctggccgatctgcccggccgccagcttctgcattttcaggccgaaggccacgttgccttccaccgtcatattgggaaacagcgcatagctttggaacaccatgccgatgccgcgcttttgcggcgccagcggcaccagatcctggccctgcagtaaaatttgcccgctgtcgaccggagtcaggccggccagacagcgcaacagcgtcgacttgccgcagccgcttggcccgagcagggtgacgaactccccctcttcggcggtgaaatcgatatcctgaaacacctgggtttggccatagtgtttgttcaggcgggtgacgttgagataagccatcgggttaacctttgtttttattcagcaggttcgccagccaggtgacgagcagcaccacggcgaaataggagatgaccagcgcgctggtgaaatgcccgctgccgttgcgcatgttgaacaggtagacctgcagcgtttcatactggctgcccaccagcaggttggcgaacacgaactcgccgatcaggaacgagaacgacagcaacacggcgatcgttccgcccttgcgcaaatttggcagcaccacccacagcgccgcccgccaggtgctggcgccgagcaagtgcgcggcgtccatcagatcgcgcaggttgatcgcctgcatgttgttgctgatggcgcggtagataaacggcagcgcgatggtgaaataacagcccaccaaaatccagggggtgccgagcagcggcagcggatcggcggcgaacagttgcatcagccccaccgccgacaccaccggcggcacggcgaacggcagcagaatcagcacgttcattaccgcgtccagcttggggaagtagtaagcgatcacaaacatcgccggcaggatcaccaccaccgacagcagcaacgtgccgaagcagatcagcagcgagtgccacagcgcctgcaaaaagcgcgggtcgctccacagcgccgtcagccacttcagggtaaaaccgtccggcaaaatggtggcgccccactgggtagccagcgcgtaaatcagcgtcgccgccagcggcagcagcaggatcaacagcagcaggccggtcaccgtgcggtggtacaagcgttcaacacgcgacatgagcattctccagccggttatgagcgcgcattgaggtagctcctgcgcagcatccattggtggatcaccgtgataaacgccatcatcaccaccagcagcatcgccagcgcgctggccaggttcggatcgagggagatgtcccccgccaccagcgccgagatgcggatcgggatcacgttgaagttgccggtggtcagcgcatacaccgtggcgtaggcgcccagcgcgttggccagcaggatgacgaaggtgcccatcagcgccggcgccagcaccggcaggccaatatgccgccagtagcgccaggggccggcgccgagcagcgccgccgattcgcgccagtcggcgcgcagcgcgtcgaatgccggatacagcagcagcaccccgagcgggatctggaagtaggtatacagcacgatcaggccgctcttcgaatagaggttgaagctctccatcaggccgtatttgcgcagcagcaacgtcaggcaaccgttcagccccagcagaatgacgaaggcgaacgccagcggcaccccggcgaagttgctggtcatgttggtgaacgacattacgaagtcatgaaaccgcgtctggccgagctgacgcagtgagtaactgccaactaatgcgatcagcaagccgtagacgctcgaccatagcgagatctccagcgagaactgaaacgcctgcaggtagaacggcgaggtgaggatatcgacatagttgccccacccccagccgctggtctcgctgaaaaagctgtgaacggcgatccacaccagcggggcgatctgaaacgcgccgaacagcacgataaacggcagcaggcacagcgcggcgatccatttggttttgctgttcatcgcgcatcctgcgccagcagcgcccggcagcgcggcttgtcgtgcggcgcctgcaatagatcgcagatcgtgccgcacagctcggtttgctgcggatcggcgtcatccaggctgaagcccgcgccgaatacgaacagcggcacctgacgctcttccggcaatacgccgccgtggctgcgatcgtcgttcatgccatggtcggcggtaaccagcacctgatagccggccgccagccactcgggcagatagcgcgacagcgagccgtcggcgcgccgcgccgcgttgcggtactgcggcgaagagaggccaaagcggtggccggcgtcgtcgatgttcatcggatggatcaacagaaagtctggctgatgacgcagacgcaggctttcggcgtcgtcaaacagatggctgtcgggataaccgtcgtcgtaatagaaatgcccgtgttgaatcggcagctcgggggcgtcggtatggcggtcgcgcgcggcgtcgaacggcgtgcggttatacaattcgctgaaccagtggtaagcggcggcggcggtgctcagcccggcggcgcgcgcataatgaaacacgctttgttgatgagaaaggcgcgagacgtgattgtgcaccacgccgctctccaccggcgtgacgccggtgagaatgcattcatacagcggccgggagagcgagggcaactcgctctccagcaggtacaaccgcccgcgtcccgccgcgcattcggcctgcagataccccatagcgtcgtgcgccacccggtagttgaggccgtccagcagcacgaggatcgttttcatggtgcgttaactcactgctgcataaacataatgacgttttcctgccacaggcgcggcagcgctttggcgctctgttcccaggccgccggatcggcgatcggatgcgcattcttgtactgctcggccggcagcagcttggccttgacgtcgtccggcagcgtcagatgttcggcgcggatcgggcgggcatagccgcgcgccaggttgatctggccggcgtcggagaagatgtattcgcgcgccagcttggcggcgttcgggtgcttggcgtatttgttgatgatggtggtgtagccggaagtgatcgaaccgtccgacgggatcagcacttcaaaacgggttttgtcgatctgatcgcggtagttcaggccgttgaagtcccacaccacgccaacctgcacttcccctttctccagcgatgcgatcaccgggttactcaggctcaggcggccggccttggccagcttgccgaagaattccaggcccggcttgagatttttctcgttgccgcccatcgcgtaggtggccgccagcacgccgctggccgcctgcgacgcggtgccgacgtcgccgatggtgacctgatagctgcccttgagcagatcggcccagctgtgcgggatgtctttcacctgctgcttgttgatgatgaaggcgatggtgccggtgtaagccagcgcccagtggccgtctttgtctttcgcccactccggcacctgatcccaggtagacggtttgtacgactgcgttacgcccttctgcaccgccaccgggccgaaggccgcgccgacgtcaccgatgtccgccgtggcgttgttcttttccgcatcgaatttggcgatctcctgtgcggagctcatgtcggtatcgacatgcttcaggccgtacttgctcaacagatcttgccaggtgcctttccagttggcccagctgtccggcatgccgacgctgttgacttcgccttctttcttcgcggcctgctccagcgccgccagatcggtatccgcggcccagctcatctggctggataacacgatggcactggttaacacagaagcgcacaaacgtttcataactgatgctccaggtggtagtgtggggatggctggactagtccagcaaggaccaaaccaatctaacggacgaatgtgataattatatgtcagcttaaaaaagcgacagttttatcacccattgcaacggcgaaaacgcgacgctggtctaccttaaggaaggccaaacgcactgaaacgggacacccgctgtatgagtgaagcaccgacgaccgtcgccaccatctgccaaacgctgagcgcccgcatcaccgccggcgagttcgccgcgggcggcaagctgccctccgagcgcgccctgagcgaacagttcgccaccacccgcattaccttgcaggaggcgctcggccagctggaggcgcagggcgtcatctaccgccaggtgcggcgcggctggtttatctcgccgccacgtttgatctacaacccgttgcagcgcagccattttcacgccatggcgcagcagcaggggcgcgccgcccataccgaagcgatcgacagcgcggtcgtcacacttgacgcgccgctggccggccgcctggcgctgcctcccggcgcgcaggcctatcgcattcgccggctgcgctacatcgacgggcgcgcggtgctgtactgcgagcactacctcaatcctgcctatttccccggtattctggacgaagatctgacccagtcgctgaccgcgctgtacgccgcacgctacggcattcactacggccgggtacgtttcgacatgctgcccaccctgctgccgcagcaggccgccgccatgctgaaggtgacctacggcagcccggcgctgttcattacgcgggtgaatcgcgatcaacatgaccgggtgatcgattgcgacctggagtattggcggtacgacgcgctgcacatcgatgtggaagcgctgtaaatgacaagggcgcatcgctgcgcccttaaagaggaaggtcagtcggcgtcgtagccgaggtttggcgccagccagcgttcgacctcgctcacgctcatccctttacgcgccgcgtagtcttccacctgatcgcgctggatctgcgccaccgcgaagtacttgctctcaggatggctgaagtaccagccggacaccgctgcccccggccacatggcgaaggactccgtcagttccatgccggtgtggcggttgacgtccagcagctgccagatggtcgctttttcggtgtgctccgggcaggccgggtagcccggcgccggccggatgccctgatagttttcgcggatcagttcttcgttgctcagattctcgtcggcggcataaccccagtgcaacttgcgcacctgttcgtgcaggtattcggcgaaagcctccgccagacgatccgccagcgccttgaccatgattttgttgtaatcgtcgtgctgtgcgtcgtacgccgccgccagcgcgtcctcctccagcccgccggtcaccgcgaaggcaccgaagtagtcggccttgccgctgcttttcggcgccacgaagtccgccaggcagtagttcgggaagtcggttttttccgtctgctgacgcagatggcggctcaccgccagcacctcgctgcgctgttcgtcgcggtacacttccacgtcgtcgccgacgcggttggccgggaacaggccgtaaacgccgcgcgggttgaggctgcgctcggcggccagccgatccagcatctgattggcgtcgtggaacaggcgcttggcctcttcccccaccacctcgtcttccaggatgcgcgggtatttgcccgccagcgaccaggtcatgaagaacggcgtccagtcgatatagtggcgcagcgtctcgatgccggccgacaccgggaatacgccaagctgccgcggcgccggcggctgatagtcggcccagtccagcgccatggcgttggcgcgcgccttgtgcaaatcgaccggcggcgtgcgcggttttttgcgcgcgtgctgaatgcgcaccgtttcatactctttgcgggtgcgcgccacaaactcatcgcgctgggtggcggacagcagcgccgccaccacgcccacggtgcgcgaggcgttttgcacgtaggtggtcgggccgctgtagttctgctcgattttcaccgcggtgtgcgccttggaggtggtggcgccgccgatcagcagcggcagggtaaagccctggcgctccatctctttggccacgttgaccatctcgtcgagcgacggcgtgatcagccccgacaggccgatgatgtcgacgttctcctcgcgcgcggtgcgcaggattttctccgtcggcaccatcacgccaagatcgacgatttcatagttgttgcactgcagcaccacgccgacgatgttcttgccgatgtcgtgcacgtcgcccttcaccgtcgccagcaggattttccccgcggaggtgccctgctgcttgctggcctcgatgtacggttccaggtaggccaccgcctgcttcatcacgcgggcggatttcaccacctgcggcaggaacatcttgccctcgccgaacagatcgccgaccacgttcatccccgccatcagcggcccttcaatcacttcgatcggccgttcggcctgctgccgcgcctcttcggtgtccaactcgataaactcggtgatgcccttcaccagcgaatactccagccgcttttccaccggccagccgcgccactccgcctgctgcaccgccgcttcgccgtctttgctgccgcggtacttttccgccagctccagcaggcgttcggtgccgtcctcgcgacggttgaggatcacgtcctctaccgcctcgcgcagctcgccaggcagatcgtcataaatcgccagttgcccggcgttgacgatgcccatgtccatgccattgcgaatggcgtgatacaggaacaccgcgtggatcgcctcgcgcaccggatcgttgccgcggaacgagaacgacacgttggacaccccgccggagatcatcgcgtgtggcagatgggttttgatgtcggcgcaggcttcgataaagtcgacggcgtagttgttgtgctcttcgatgccggtggcgacggcgaagatgttcgggtcgaaaatgatgtcttccggcgggaaaccgacgcgttcggtcaaaattttataggcgcggcgacagatctcgaacttgcgctcgcgggtgtccgcctggcccacttcgtcgaacgccatcaccaccaccgcggcgccatagcggcgcaccagccgggcgtggtggataaaggcctcttcgccctccttcatcgagatcgagttgacgatgcccttgccctgaatgcatttcaggcctttctcgataacggaccacttggaggagtcgatcatgatcggcacccgggcgatatccggctcgccggcgatcaggttgaggaaacgcaccatcgccgcttcggcgtcgagcatcccctcgtccatgttgatatcgatgatctgcgcgccgctctcgacctgctggcgcgccacgtcgagcgcctcgttgtatttttcttctttgatcaggcgtttgaatcgcgccgaaccggtgacgttggtgcgctcgccgacgttgacgaacagggtgctggcgtcgatggtcagcggttccagaccggccaggcggcaggcgaccgggagctccggcagccggcgcggcggcacgccctcgaccgccttggccatcgcggcgatatgttccggcgtggtgccgcagcagccgccgatgatattgaggaagccggcctgcgcccactccccaacctggcgcgccatctcggccgcatccagatcgtactcgccgaaggcgttcggcaaaccggcgttcgggtgcgcggtgacgtaggtctccgagatgcgcgccagctcggcgacgtactgacgcagctcatccggccccagggcgcagttcaggccgaaggtcagcggcttgacgtggcgcagcgaattgtaaaacgcttcggtggtctggccggacagggtgcggccggaggcgtcggtgatggtgccggaaatcatgatcggcagttccactcccagcgcttcgaattcagtttccaccgcaaaagcggcggccttggcgttgagggtgtcgaagatggtctcgatcatgatcagatcgacgccgccctccaccagcgcgcgggtcgattcgcggtaagccgccaccagttcatcgaacgagatgttgcggaacgccggatcgttgacgttcggcgagatggacgcggtgcggttggtcggccccaacaccccggcgacgtagcgcggtttttccggcgtgcgcgccgtccattcgtcggcgcaggcgcgcgccaggcaggcggcctgatagttaatctcggcggacagcgactccatatggtagtcggccatggcgatggaggtggcgttgaaggtattggtctcaaggatatcagcgcccgcctcgagataggcgtaatgaatggcggtgatcacttccggcttggtcagcaccagcagatcgttattgcctttcagatcgctgcgccagtcggcgaaacgctcaccgcggaaatcgcgctcatccagacggtagctctggatcatggtgcccatgccgccgtccaacaccaaaatgcgctgcgctaactggcggcgcagttgttctactcgattcgtcactgtaaccccttccattgccatccagcccattgctcaactgccgcaaacaccaacgagtcatcctagcacagcttgtaaggacaaagggccaggcgacaattgagagtttttcaggttgtgcgccaacacctccgatgagctgacggcggcttgcaattcatcggcaaaaaacgaaaatgaattccatcatacggaaaaaggaatctcacccatggccacccctgctcccgccaagcgcggcaagaagccccgcgcagcagcccccgccgccagtgcggcgaccggtcaggtacaatcgttgacccgtggcctgaaactgttggaatacatttcggaagcccagggcaacgtggccctgaccgatctggcccagcaagccggcctgccgaactccaccactcaccgcctgctcaccaccatgcagcagcagggattcgtgcgccaggtcggcgatctcggcctgtggaccatcggttcgcacgcctttgtggtcggcagcagcttcctgcaaagccgcaacctgctggcgatggtgcatccgacgctgcgccgcctgatggaagagtccggcgaaaccgtcaacctggcggtgctggataccagcgagtaccaggcgatcatcatcgatcaggtgcagtgcacggcgctgatgcgcatgtcggcgccgatcggcggcaaactgccgatgcacgcctccggcgccggtaaagcattcctcgccaccctgccggacgatcaggtgaccaaactgctgcacaagaaaggcatgcacacctacacgccgcataccctgacgccgcacaacctgaaagagggactggcgcagatccgcaagcagggcttctcctttgacgacgaagagcacgcgctcggcctgcgctgcgtggcggcctgcatcttcgacgaacaccgcgaagccttcgccgccatttccatctccggcccggtgtcgcgcatcactgacgatcgcgtgatcgagctgggcgcgctggtgatccacgcggcgaaagagatcagcctggcctacggcggcgtgcgttaatccgatcatccgaggggcgccccagcgcgcccctgctcccctgccatgctctgttgtcagcatgtaacaggctgtcggcatcctgtttagcgcacaggaaaaaagcttgaagccgatcacagttaacgatcctcacggcgaaagcccattgcaaccgctcaaacttccttcgacaatgttaccgataacatgttaccggtaacaatcaaactgaacgaaggtaacgtcacccggtgttttggagctaagccatgaccaacaatcaaaatcgcatttacgtcgttatgggcgtttccggcagcggcaagtccgccgtcgccgccgccgcggcccgccaactctccgccggcttcctcgacggcgacttcctgcacccacgcagcaacatcctgaagatggccgccggcgaggcgttgaacgacgacgatcgcgcgccgtggctggccgcgctcaacgacgccgccttcgccatgcagcgcaccaacagcgtgtcgatcatcgtctgttcggcgttgaaaaagcagtatcgcgaccgcctgcgcgccggcaacggcaacctgtcattcatctatctgcacggtgagttcccggtgatcgaatcccgcctggcggcgcgcaacggccacttcttcaagccgcagatgctggtcacccagttcgccgcgctggagcaaccgggcgccgacgagaacgacgtgatggcgatcgacatcaatcagccgctggacgcggtgatcgccgataccgtgcgccatatccagagcttcctgccgcaggacgtgtgcgcgtgagtaccgtaacgctggtcggtaccgcagtcggctcggttttactgctgttattcctggtgatgaaggcgcgcatgcacgccttcgtcgcgctgatgctggtgtccatcgccgccggcattttctccggcatgccgctggaacacatcgccgacaccatgcaaaaaggcatgggcgacacgctgggcttcctggcgatcgtggtggcgctcggggcgatgttcggcaagatcctgcatgaggtcggcgcgctcgatcaaattgcggcgcaattgctgaaacgattcggacaaagcaaagcgcactacgcgctcggcatcgccgggctgatctgcgcgctgccgctgttcttcgacgtggcggtggtgctgctgatcggcatcgtgttcgccgtggcgcgccgcaccgacggcaatatcgtcaagctggctattccgctgttcgccggcgtggccgccgccgcctccttcctgctgccggggccggtgccgatgctgctggcgtcgcagatgaaggccgatttcggctggatgatcgccatcggcctggtagcggcggtgatcggcatgctgatcgccggcccgctgtacggcagctttatcagccgtttcgtcaactggccgatgccgccggaagagaatgagccgacgctgaccaagggcaatctgccgtcgttcggcttcagcctggcgctggtgctgtgcccgctggtgctggtcggcatgaaaaccatcggcgcgcggctggtcacccccggctcgcagctgcagcagtggctggagtttatcggccacccgttcaccgccatcctgctggcctgcctgatcgtgatttacggtctggcgaagccgcgcggcatgagcaacgaacagacgctggccatctgctccgccgcggtgcagccggccgggatcatcctgctgatgaccggcgccggcggggtgttcaagcagatcctggtggattccggcgtcgggccggcgctgggtgacgccatgatcggcgccggcctgccgatcgccgtggccgcctttgcgctctccgccatggtgcgggtgatccagggctcggccaccgtcgcctgcctgaccaccgtcggcctggtgctgccggtcaccagccagctcgggcttagcggcgggcaactggccgcgctggccatctgcatcgccggcggctccatcgtgctgagccacgtcaacgatgccggcttctggctgttcggcaaattcaccggcgccaacgaactgcaaacgctgaaaacctggacggtgatggaaaccattctgggcagcgtcggcggcgccatcggcatgattgcattcacgatgttttaaatcctaaatcgcccccggccttgcacaccagggctgcaaatcacccccgggggcaccgccacaggcggcgactataacaacagcaatgtgaggaaggcatgattaatccaaccttgtcccgtgtcacacagcgcatcatcgaccgttcccaggccagccgcgccgcctatctggcgcgtatcgaggcggcccgctcccaaaccgtccaccgcgcgcagctcgcctgcggcaacctggcccacggtttcgccgcctgtcagcccgatgacaaggcgtcgctgaaaaacatggtgcgcagcgatatcgccatcatcaccgcctacaacgacatgctgtcggcccaccagccgtacgaacattacccacagcggctgaaacaggcgctgaaggcggtgggtgccgtgggccaggtggccggcggcgtgccggcgatgtgcgacggcgtgacccaggggcaggacggtatggagctgtcgctgatgagccgtgacgtgatcgccatgtcggccgctgtcggcctgtcgcacaatatgttcgacggcgcgctgttcctcggcatctgcgacaagatcgtgccggggctggtgatggccgccctctccttcggccacctgcctgcgctgttcgtgccggccggcccgatgagcagcggcctgccgaacaaggaaaaagtgcgcgtgcgccagctgtacgccgagggcaaggccgaccgcctagcgttgctggaggccgaggctgcctcttatcacggcatcggcacctgcaccttctacggcaccgccaacaccaaccagatggtgatggaagtgatgggtctgcatctgccgggcgcctccttcgttcatccggacacgccgctgcgcgacgcgctgaacgacgccgccgcgcgccaggtgacccgactgaccgacaccgccggcaactacctgccgatcggccgcctggtggacgagaaagtggtggtgaacggcatcgtctcgctgctggcgaccggcggctcaaccaacctgaccatgcatctggtggcgatggcgcgggcggcgggcatcatcattacctgggacgatttctcggagctgtcggaggcggtgccgctgctgtgccgtatctatccgaacggcccggccgacatcaaccagttccaggccgccggcggcgtgccgctggtggtgcgcgagctgctgcaacacggcctgctgcacgaagacgtgcataccgtggccggtttcggcctgcgccgctacacccaggaaccgtggctggacaacggccaactggtgtggcgcgaaggcgtggccggctcgctcgacgccagcgtgatcgccagcgtggcccagccgttcgaacatcacggcggcaccaaagtgatggccggcaatctgggccgcgcggtgatgaaaacctcggcggtgcccgccgacaaccagatcatcgaagcgccggcggtagtgttcgacagccagcacgacatcgtgccggcgttcgaagccggcaagctggatcgcgattgcgtggtggtggtgcgcttccaggggccgcaggccaacggcatgcccgagttgcacaagctgatgccgccgctgggcgtgctgatggatcgcggcttcaaagtggcgctggtgaccgacggccgcctgtccggcgcctccggcaaggtgccttccgccatccacgtcaccccggaagcctataccggcggcctgctggcgaaagtgcgcgacggcgatccgatccgcgtcaacggccgcagcggcgagctgcaggtgctggtcgacgccgacgaactggcgcggcgcacgccttgccaacccgatctgagcgcggaacacatcggctgcggccgcgagctgttcggcgcgctgcgcagccagctgtccggcgccgagcagggcgcctgctgtatcaaattttaatcgatagcctggccgcatcgccgcctggcggcggccacagaggagaacgtcagcatgaacaagtggacaacaagcgccgagcagatcctgacggcggggccggtggtgccggtcatcgtgatcaacaagctggaacatgcggtgccgttggcgaaagcgctggtcgccggcggcgtgcgggtgctggaggtgacgctgcgcaccgcctgcgccatggacgccattcgcgccatcgcccaagaggtgccggaagcgatcatcggcgccggtacggtgatcaatccgcagcagctgcgggaagtgaccgaagccggtgcgcagttcgccatcagcccaggcctgaccgacgagctgctcaaagccgccaccgcaggttccattcccttgatcccgggcatcagcaccgtttccgaactgatgcagggcatggattacggcctgcgcgagtttaaattcttcccggcggaagccaacggcggcgtaaaagcgctgcaggcgatcggcggcccgttcccgcaggtgcgcttctgcccgaccggcggcatctcaccggacaactaccgcagctatctggcgctgaaaagcgtgctgtgcatcggcggctcctggctggtgccggcggacgcgctcgaaagcggcgactacgcgcgcatcactgaactggcgcgcgccgccgtcgcgggcgccgaggcctgatttacatcgcagcggtggcggccggcagcgccgccccgctgcgctggctgaaccgctgcttcttgcgataagcaaatacgtcttccacatgcccttcgcggatgcgctgctgcaacccgcgccaatactccgcggtaaacagatcgctgtgcagctcttcaaacacctgccgaatgcgccgatcgccgcacagaaagtggcggaactcttccgggaacacgtcgttgggcgcgatgctgtaccacggctcgctggccaactcatcttccggataacgcggcggcgggatatcgcggaagttgacctcggtcatgtagcaaatctcgtcgtagtcatagaacaccacccgcccgtggcgcgtcacgccaaagttcttgaacagcatgtcgccggggaagatattggcggcggctaactgcttgatcgcgttgccgtactcttcaatcgcatcgcgcatctgctggtcgttggcctgctccagatacagattcagcggcgtcatgcgccgttccatatacaggtgcttaatcacaatgcgatcgccgagatcttccagtttgcccggcacttcgcgccgcagctccgccaacagttccgggctgaggcgcgccttgtcgacgacgaaattttcgtactcttgggtatccgccatacgcccgacgcgatcgtgctctttcaccagctgatagcaggccatcacctgcgcctgcgtcacctctttttgcggggcgaattcgtccttgatcactttaaacacccgatcgaaggacggcagggtaaacaccagcatcaccatgcccttcacccccggcgcgatgatgaactgctcctgcgactgcgccataaaggtcaggtattcgcggtagcattcagttttgccgtgcttctggcagccgatcgccatgtacagctcggcggtggtcttgcccggcaggatctcgcgcagccactcgaccatcgccgccggcagcggcgcgtagaccatgaaataagaacgggcgaagccgaagacgatgctggcctcagccttaccggtcaggcaggcatcgataaacagcgcgcccgactcgctgtggtggatcggcagcaagaacgggtaaacgccgtcggccaggcgcagcttgccgaccagccaggcggccttgttgcgatagaacagttcgttggcgatctgaaaggtggcccccgccagttgctgcggactgaaggcgcgctgcagcgcctgagtgatgtagcgaatatcgcgcgtcaaatcttcccacggcaaccgcagcggcagatcgctcagcacgctgcgcagcatcgccggcagatcgccattggaggtgaaatcgcgcgccagcggacgcggaatgtcgcgaaatcgccgttccggctgcgaactgaacacgaacagcttgtccggcgtcagatcgcgatgcttgaacagccggcagtagaccgagttaaaaaagctttcggctatctcgaaacgcgggtagtccggcagcagatcgatataaaccgctttgacccggctggggaagtcggcgtcgaaatatttctgcccggtgatgcatttgagctgctccaccaccaggccgacatgatggtcatacagatggatgcgctttttcatcgcctgctgcaccgtcggccagtccgcctgctcgaagcgctgctgcgcgccggcggtcacctccaaaaagcggccgtactgcgcatcgaagccctgcaggatcgtctgtgcgatcaacaactccagttttgccgccatccttacccccgccagaaaaagaagcctgcgcatgcaggctccgggtgaaacgtcttcaagcttgccgcatcagaactgctgttcttccgtcgaaccggtcagcgcggtgaccgaagaggcgccgccctgaatgatggtggtgaccttgtcgaagtagccggtgcccacctcctgctggtgcgacgcaaaggtgtaaccgcgatccaccgcggcgaactccgcctgctgcaccttctcgacgtagtgtttcatgccctcgccctgcgcataggcgtgcgccaggtcgaacatgttgaaccacatgctgtggatgcccgccagcgtgatgaactgatacttgtagcccatgtccgacagcgcctgctggaagcgggcgatggtctgatcgtcgaggttcttcttccagttgaacgacggcgagcagttgtaggccagcagcttgcccgggtatttggcgtgaatggcgtcggcgaagcgctgagcggcatccagatccggcgttgaggtttcgcaccacaccatatcggcgtaaggggcataggccaggccgcggctgatcgcctgctcgacgccggcatgggtgcggaagaagccttccgccgtgcgctcgccagtgacgaaagcgctgtcatacggatcgcaatcggacgtcagcaggtcggccgcatctgcgtcggtacgggcgatcaccagcgtcggcacgccgagcacgtcggcggccaggcgagcggcgaccagcttctggatcgcttcctgtgtcggcaccagtactttgccgcccatatgaccgcatttcttcaccgccgccaactggtcttcgaagtgcaccccggcggcgccggcggtgatcatcgctttcatcagctcgaaggcgttcagcacgccgccgaagccggcttccgcatcggcgacaatcggcaggaagtaatcggtgtagcctttgctgcccggctcaatctggttcgcccactggatctgatcggcgcggcggaaggtgttgttgatgcgctcgaccaccttcggcaccgagtccaccggatacaacgactggtcagggtacatggccgccgcgctgttggcgtcggccgccacctgccagccggacaggtagatagcctcgacgccggctttagcctgctgcagcgcctggccaccggtcagcgcgcccaggcagttcacgtagcctttgcgcgccttgccgttcagcaacgcccacagtttggcggcgccgttttgcgccagggtacattccgggttgaccgaaccgcgcaggttgatcacgtcttcggcgctgtaagggcgggtgatgccttcccaacgggccgatttccattcctgttccagctgctggatctgttgagagcgagaggtagacataatttttatcctttcagtcatgtagggttgattgggaaagttcaggccagcagctcatagccgggcaacgtcaggaaatcgattaattcatcttgcgtggtgatgcgctccatcaggcgcgccgcctcttcgaaccggccggcgttaaagcgcgcttcccctacttcttcacgcaccaccaacatctcttcttgcaacatctggcggaacagcgccttggtgaccgggcgcccgtcgttcaggctcttctcgtggtggatccactgccagatagaggtacgggagatctccgccgtcgcggcatcttccatcaacccatagataggcacgcagccgttgccggagatccaggcttcgatgtactgcaccgccacgcggatattggcgcgcatccccgcttcggtgcgttcgccgtcgcatggttccaacagctgcgcggcgctgattggcgcatcctgctcacgcatcacgtccagctgattctggcgatcgcccaatgccttgccgaacacctccatcaccgtgtccgccagccccgggtgcgccacccaggtgccatcgtggccattgttggcctccagctctttatccgcccgcaccttgttcagcacccaggcgtttttctcagcgtctttgctcgggataaacgccgccatgccgcccatggcgaaggcgccgcgcttatgacaggttttgatcaacagacgtgaataggcgctgaggaaaggtttctccatggtcaccgactgacgatccggcagcacgcgatcgccgtgattcttcagcgttttgatgtagctgaagatgtaatcccagcggccacagttcaggccgacgatgtgatcgcgcaggtgatagaggatctcgtccatctggaacaccgccggcagggtttcgatcagcacggtcgccttgatggtgccacgtggcagatcgaaacgatcctcggtaaagctgaagacatcgctccaccaggccgcttcctcccaggactgggttttcggcaggtagaaatacgggccgctgcccttggccaacagctgacgatagttgtggtagaagtacagcgcgaaatcgaacaggccgccggggatggcttcatcacgccacaagacgtgtttctccggcaggtgcaagccgcgcacgcgagcgatcaacaccgccggattcggtttcagttggtagatcttgccggcttcgttggtgtaggagatggtgccgttaaccgcatcgtgcaggttgatttgaccatcgatgactttgtcccagcttggcgccagggagtcttcgaagtccgccataaatacttttacgttggcgttcaacgcattgatcaccatcttgcgttctaccggcccggtgatctcaacccggcgatcgcgcaggtcttgcgggatgccgcggatctgccagtcgccctcacgaatggaattggtttccgaaataaatccaggcagctcgccgcgatcgatattttgctgccagcgggcacgcgccgccagcagctcattgcgccgcggcgtgaatttccccaccagttccgccaggaattcaaccgcttcatccgttaatacctggcgctccgctgcggcgaaaccctgggtaaaccttaactccgtgcctgctatctgttgcgtcatgaccttgctccttcccatcgttgcgcccgagcgaccggcgcattttcatcagaaatcactgtggatcagggcggatgaaacgatcctaaactggtcagatctcatcccgatagctctaagaatactcaacaaaaaacaaaaatcaaaaaccatttccattttattattaaatattttattaacactttattatcaattagttagaacaaataacataaccaacaggtaaggaaactggttccaatagaatcgcaaagataggctaacgcgttgttggccaatggttttttggggaaagtgaccggtaaaaaggggatcgtgcggaggatcaacagcgcggcggcctcgattcagccgccggcaggcagaaaagatcagtcgagagtcggattcatatggcgcagatcgtaaggcgtgatctggtagacgtaatagttgagccaattggaaaacagcaggtggccatggctgcgccaggtggctttcggtgtcagtgcggggttgtcatcggggaagtagttgagcggtacggcaggatcgaggccagcttcgttgtcgcgacaatactccccggccagggtcagggcatcatactcaggatggccggtgacaaacgccaggcgcttatccctgctggcgaacaggtaggcgccggcctgctcggattcggccagaatatccaggtcggtatattggcgaatcacctcggtcgggaaatcggcatagcgtgagtgcggcgccaggaagctttcgtcgaagccgcgcgtcagcaacgcatgctgctgcagcgtttggtgcggataaacgccggagagcttcacttcgcgcgtcatcttgggaataccgtacaggatgttcaacgccgcttgtaccgcccaacacacgaacagcgtggaggtgacgtggtttttggcccagtcaatcacccgttcgatctgcggccaataggcaacatcgcagaaatcaaccagccccagcggcgcgccggtgacaatcaggccatcgaagttctcattctggatatcctcgaagtcgcagtagaagttgttcagatgctcggccggcgtgttcttcgattcgcggctgtcgatgcgcagcagctggatatcaatctgcagcggcgagttggacaacagacgcagaaactggttttccgtttcgatcttctttggcatcaggttgaggatcagcactttcagtggcctgatttcctgtgtttttgcccgcgaggatgtcatcacgaagacattctcaccgcgcaagaaattgaccgcaggtaactcatcaggaacacgaatcggcattgcttaaccctcacacatccatttatacgtttagacttctagatgcccgaagatagcgttttttttcgtcgctgtcgagcattcagcggaaaggtgaaaatgtttcattgcgcagcctgcgccgggatataagcagagggagtaaagcggatgaaaagcaaaaaggccatcctttcggatggcctcttggcttatttgatgcttggcagtgtcctacagtattcgtctcatcctgagactctcccctgcggggccgccgcaagcggcgttaaggcccgttcccgacgggcctttcgcatgcccatgctcgagcagaacaccaaataacagacaaaacaaaaagccccatgctttcgcatgaggcttgttgttttatttgatgcttggcagtgtcctactctcgcatggggagaccccacactaccatcggcgctacggcgtttcacttctgagttcggcatggggtcaggtgggaccaccgcgctattgccgccaagcaaattcttttttctgccgaacttctaaacccactttaaataaagtggtgctgatacccagagtcgaactggggacctcacccttaccaagggtgcgctctaccaactgagccatatcagcacgcttaatttgatgcctggcagtgtcctactctcgcatggggagaccccacactaccatcggcgctacggcgtttcacttctgagttcggcatggggtcaggtgggaccaccgcgctattgccgccaggcaaattcgtttcattccaaccgcttcatcgctgaagcctgtcaatccaatctgtaaacaagctgaatattgtcttggtctcaccaaaacaccttcggtgttgtaaggttaagcctcacggatcattagtactggttagctcaatgcatcgctgcacttacacacccagcctatcaacgtcttagtcttaaacgttccttcaggggccttaaaggcccagggaagactcatcttgaggcaagtttcgcgcttagatgctttcagcgcttatcttttccgcacttagctaccgggcaatgccattggcatgacaacccgaacaccagcggtgcgttcactccggtcctctcgtactaggagcaacccctctcaatcttccaacgcccacggcagatagggaccgaactgtctcacgacgttctaaacccagctcgcgtaccactttaaatggcgaacagccatacccttgggacctacttcagccccaggatgtgatgagccgacatcgaggtgccaaacaccgccgtcgatatgaactcttgggcggtatcagcctgttatccccggagtaccttttatccgttgagcgatggcccttccattcagaaccaccggatcactaagacctactttcgtacctgctcgagccgtcactctcgcagtcaagctagcttatgcctttgcactaacctcacgatgtccgaccgtgattagctaaccttcgtgctcctccgttactctttgggaggagaccgccccagtcaaactacccaccagacactgtcctcaccccggatcacggggccgagttagaacatcaaacattaaagggtggtatttcaaggatggctccacgcagactggcgtccacgcttcaaagcctcccacctatcctacacatcaaggctcaatgttcagtgtcaagctatagtaaaggttcacggggtctttccgtcttgccgcgggtacactgcatcttcacagcgagttcaatttcactgagtctcgggtggagacagcctggccatcattacgccattcgtgcaggtcggaacttacccgacaaggaatttcgctaccttaggaccgttatagttacggccgccgtttactggggcttcgatcaagagcttcgccttgcggctgaccccatcaattaaccttccagcaccgggcaggcgtcacaccgtatacgtccactttcgtgtttgcacagtgctgtgtttttattaaacagttgcagccagctggtatcttcgactggcttcagctccatccgcgagggacttcacctacatgccagcgtgccttctcccgaagttacggcaccattttgcctagttccttcacccgagttctctcaagcgccttggtattctctacctgaccacctgtgtcggtttggggtacgatttaatgttacctggagcttagaggattttcctggaagcagggcatcaactacttctgcaccgtagtgcatcgtcatcacgcctcagggttaatatgcaaccggatttaccaggtcacaccccctacacgcttaaaccgggacaaccgtcgcccggccagcctagccttctccgtccccccttcgcagtaacaccaagtacaggaatattaacctgtttcccatcgactacgcttttcagcctcgccttaggggtcgactcaccctgccccgattaacgttggacaggaacccttggtcttccggcgagcgggcttttcacccgctttatcgttacttatgtcagcattcgcacttctgatacctccagcaaccctcacaggccaccttcaacggcttacagaacgctcccctacccaacaacgcctaagcgtcgctgccgcagcttcggtgcatggtttagccccgttacatcttccgcgcaggccgactcgaccagtgagctattacgctttctttaaatgatggctgcttctaagccaacatcctggctgtctatgccttcccacatcgtttcccacttaaccatgactttgggaccttagctggcggtctgggttgtttccctcttcacgacggacgttagcacccgccgtgtgtctcccgtgataacattcttcggtattcggagtttgcatcggtttggtaagccgggatggccccctagccgaaacagtgctctacccccgaagatgagttcacgaggcgctacctaaatagctttcggggagaaccagctatctcccggtttgattggcctttcacccccagccacaagtcatccgctaatttttcaacattagtcggttcggtcctccagttagtgttacccaaccttcaacctgcccatggctagatcaccgggtttcgggtctataccttgcaactaatcgcccagttaagactcggtttccctacggctcccctatacggttaaccttgctacaaaatataagtcgctgacccattatacaaaaggtacgcagtcacaccacgaaggtgctcccactgcttgtacgtacacggtttcaggttctatttcactcccctcgccggggttcttttcgcctttccctcacggtactggttcactatcggtcagtcaggagtatttagccttggaggatggtccccccatattcagacaggatgtcacgtgtcccgccctactcatcgaactcacgacctgtgcattttagtgtacggggctatcaccctttactgcgcgactttccagacgcttccactaacacacaagccgattcaggttctgggctcctccccgttcgctcgccgctactgggggaatctcggttgatttcttttcctcggggtacttagatgtttcagttcccccggttcgcctcatgccactatgtattcatgacatgatagtgtgtcgaaacacactgggtttccccattcgggtatcgccggttataacggttcatatcaccttaccgacgcttttcgcagattagcacgcccttcatcgcctctgactgcctaggcatccaccgtgtacgcttagtcacttaacctcacaacccgaagatgtttccatcgttcgcgctgcaaacatttgagagactctatgacaggttactcttcatcccaatacatctacggagggacaaatttcagccgtcatgtttcaattttcagcttgttccagattgttaaagagcaatatcttaaacatgactcggaagtcatctttaagatatggtgtatcgtcagatactgaagaccgccgctttcaccgggtgggtcggaagcttggcgtcccctaggggattcgaacccctgttaccgccgtgaaagggcggtgtcctaggcctctagacgaaggggacacgacaccgtacttttatgacgcttttgctcgttactttttcatcagacaatctgtgtgagcacgccacgcgaagcaatatctttaggtgaggaggtgatccaaccgcaggttcccctacggttaccttgttacgacttcaccccagtcatgaatcacaaagtggtaagcgccctcccgaaggttaagctacctacttcttttgcaacccactcccatggtgtgacgggcggtgtgtacaaggcccgggaacgtattcaccgtagcattctgatctacgattactagcgattccgacttcatggagtcgagttgcagactccaatccggactacgacgtactttatgaggtccgcttgctctcgcgaggtcgcttctctttgtatacgccattgtagcacgtgtgtagccctactcgtaagggccatgatgacttgacgtcatccccaccttcctccagtttatcactggcagtctcctttgagttcccggccgaaccgctggcaacaaaggataagggttgcgctcgttgcgggacttaacccaacatttcacaacacgagctgacgacagccatgcagcacctgtctcagagttcccgaaggcaccaatccatctctggaaagttctctggatgtcaagagtaggtaaggttcttcgcgttgcatcgaattaaaccacatgctccaccgcttgtgcgggcccccgtcaattcatttgagttttaaccttgcggccgtactccccaggcggtcgatttaacgcgttagctccggaagccacgcctcaagggcacaacctccaaatcgacatcgtttacagcgtggactaccagggtatctaatcctgtttgctccccacgctttcgcacctgagcgtcagtcttcgtccagggggccgccttcgccaccggtattcctccagatctctacgcatttcaccgctacacctggaattctacccccctctacgagactctagcttgccagtttcaaatgcagttcccaggttgagcccggggatttcacatctgacttaacaaaccgcctgcgtgcgctttacgcccagtaattccgattaacgcttgcaccctccgtattaccgcggctgctggcacggagttagccggtgcttcttctgcgagtaacgtcaattgatgaacgtattaagttcaccaccttcctcctcgctgaaagtgctttacaacccgaaggccttcttcacacacgcggcatggctgcatcaggcttgcgcccattgtgcaatattccccactgctgcctcccgtaggagtctggaccgtgtctcagttccagtgtggctggtcatcctctcagaccagctagggatcgtcgcctaggtgagccattaccccacctactagctaatcccatctgggcacatctgatggcaagaggcccgaaggtccccctctttggtcttgcgacgttatgcggtattagctaccgtttccagtagttatccccctccatcaggcagtttcccagacattactcacccgtccgccgctcgtcacccagggagcaagctcccctgtgctaccgctcgacttgcatgtgttaagcctgccgccagcgttcaatctgagccatgatcaaactcttcaattaaaagcttgatttgcttccactcgagaagcgatgctcaaagatttactgcatgaattttacttcagttagtcactcttcaagacttgatattttttgcatccgaagatgctggatatcgtcttgtggagtgcccacacagattgtctgataaattgttaaagagcagtgagttaggcgctttcgcttgctaactcgaggtggcgtatattacgctttcctctttcagagtcaaccctaattttcaggattttttctctttcttcccggccgctctgtgaagtgaatcacttgcgccgtgtcgatggaggcgcattatagggatccgagttttttgcacaaccccttttttgatcttttctttctgtttgcacacttttcagcccttccgggtggatcttgtgcgatcagggccattttccgcaggatcctgcgcggcgactggttgtaattccatcgccagggtctagtattgccggtaaatatgatcccgacgtgaggcaagcaccatgtccgatgcagtacgttcttatcttcaatacacacccaaactcggtcaacgcgtcttgatcgatccttccagcgtggtgatcggcgacgtcgatctggcggatgacgtcagcatctggccgttggtcgccatccggggcgacgtcaatgcggtaaagatcggcgcgcgcagcaatattcaggacggcagcgtactgcatgtgactcatcgctccgaacataaccccgacggttatcccctgcttattggggaagacgtgaccgttggtcataaagcgatgctgcacggctgcgccatcggcaaccgggtgctggtcgggatgggatcgatcctgttggacggcgtagttgtagaagatgacgtgatgattggcgccggcagtttggtggcgccgggcaagcgcctggcgagcggctatctttatatgggtagcccggcacgccaggttcggcctttgaccgccgccgagttggagggattgctttattcttctaacaactatgtacgctggaaagacgaatacctgtcggaagatatctgatgggcgccccgttccctataaagagaacggggtaggggatttatgccaccagctcgctgcgcagctggcgtaataccggctcgatctccggcatcactccgtgccacagcaggaaagcatgtgccgcctgccccaccagcatacccagcccatcggcgtattccgttgcgccctgctgctgcgcccaggccagaaatggcgtaacgccttgctgatagaacatgtcatagcaacgggtttgcgcattcaccacgcctgcaggcaacgccgggatctccccgctgatgccggacgccgtcgcattgatcaccagatcaaaagcttgctgatccagttgatccatcggcaccgccgagatctcccccagatgccggaaagcgtcggccaactcttgggcccggctgaaagtgcggttggtgatcgtgagccggcagccgaaagacagcagcggcaggatcacgccgcgcgccgcgccgccggcgcccaccagcagaatgcgatcctgcggccggatcaattgctgacgctgcagatcggtcagcaaaccgatgccgtcggtgttgtcccccaatagaccgccattcggcaataccttcagggtgttaaccgcaccagccatcgccgcgcgctcactcagttcagaggctgccgaataagctcgctccttgaaaggcaccgtgacgttcgcccccaaccctccggcgcggataaacgcctgcaggctggtttcaaaaccgtccagcggcgccaacaccgtcccataaggatgctcaatgccggtctgggcagcaaacagcgcatgaattcgcggcgacttgctgtggccgatagggttgccaaataccgcaaacttctccatgcccattacctctagccctgacggatctgttcgccggtcagaacgtctctgatttcggaaggattaagacggccacccaccttgccgcgcaataccgggaaagcttcgccgaactgccgcgtgacctcatccgcactgcggcacggttccagcccactgagattggcgctggtcgataccagcggcttgccgtactgccggcacagcaactgcaccagcggatgatcgctgacgcgcaccgccagtgaactgaaacgcccggtcaacaaacgcggcgtctccggccgagcgggcaacacccaggttaccggcccaggccagctggcaaacatcgtcgcgcgctgctgttcgctgagcgtactgtcgtcaatataaggcttaagctgcgcatagtcggcggcgatcaaaatcagccccttttcccacggccgctgtttcagcgccagcaatgcattgaccgcctgctcgctgtcgggatcgcaacccaggccgaataccgcttcagtgggatacgcaatcacctgctgttgatgcaaagcatcgatgatagataaaagattcgggcttaattctgaattcatgatgtgattattctgtagtcgcgacgggttttccgcacagcttgctggcacagcacaggacggggccttttgccgtgcgcttttccatcagcagcgggtaatggcagtaggcgcattcaccggcgacgggtttaacgttgagggcgaactggcattccgggtaacgatcgcaggaatgaaaaaccttgccgtaacgcgacttgcgctgcaacagcttgccttgcccgcactgcggacaggtaatggcggtttcgtcaggcttgtcgatcacttctgtgtgatcgcattgcggataatcgctgcagccgataaacatgccgtagcgcccctggcgcagcaccaacgtcgcctgacacttcgggcactgttgcccatccaacaccttaacgacatgcccatcggcctgcgctttcagcggccgaatatattggcattcagggtactgggaacagccgaggaaggggccgtggcgaccgctacggatcaccagctcggccccgcattccggacagggttcattttgcctggcggcaaaaatcgcgttttttgtcataacgtcttctatgcgcgttatcggctcaatgcagataaccttcgttcacttcaaacaacagttcttccatttgctgataggcgctttcatatccggggatattaaacagcaccatcaacacgacccatttcagatcttcgagatcgaattccgcattatccaaagccataacgcggtcgataaccatttcacgggtttcgaggttcaatacctgaatctgttccaggaacaggagaaaaccacggcagccggcgtccaaacgcgcgctttcctcttcggtatagatccgcatcgccagcggatcggcatccataaagtaaggcgcgttttgaccttcttgcaggtcggccaacttctcaagccaattcaacgcgttgtagatatcatcctgatgaaaccccgcctgggcgagatcatcggtcagttgatcctgatcgacgcgcatctctggttcattgtggatataagtttcaaacaagtacatgagtacgtcgaacatggcttgccctccttattcggacatagccgccgggtacagctgcgatccaccctgctaactccagttcgagtaacttgattaccaccactggcacaggttggccggcacgttcagcgacgacgtcaacaggtgtcacctcatctcctacgttagccaacacatcggcaaatggcaattcaacttcagcctgcgacgcacaaatagttgtattttcgttcagtggcaaccactgaaggccgcttcccagcaattcggcgatatctttcggcccagtcaccagatgcgcgccctgttggatcagccagtgcgtgccttcgctcatcgggttccctaacggccccggcaaggcgaatacctcacgcccttgctccagcgcatagcgagccgtcaccagggtaccgctgcgcaacgaggcttctatgaccagcaccccctggctcagcccgctgataatgcggttgcggcgcggaaaatggtcggccaggggcaaatcggtgaccaaatgatctgaaatcaccgcaccgccctgctcgactatctgctctgcgagcctgtggtgccgccgcgggtagacattggccagcccgcagcccaacaccgctatcgtgcaacccccggccgccagcgctgcgcgatggcaaatgccgtcgatgccgatcgccaaaccgctggtgatggtgaaaccgcaacgcgccaattcctcggcgaaatggttagcccagcgctcgccgtagtggctgaactgccggctgccaaccatggcaagttgcgggcgcaacagcgcctgaggatctccatcgatcagcaggaacagcggcgcatcgtcgatctgagccaggcattcgggatagccggccgctgcatagttcagcatacggtgcgccggcacttccagccaacgcaaggtggccgccagataaccgggatccgtctggttgaactgtgcccgctgcctttcgttcaatcccagttcacgcagcgcgcgattgggttcgccccccatttgcgataactgctgcacgatccggctggccgtcggggtttgtagccccgtaaccccccgcatccgtaaagcgatctcttccagccgcatcctctgttccctcagcaaaaacggtggtattaccaatctgagcaattggtgcgcaatgctgtcaatcaggtcgggaaatgtctagaatagaggttaaacctcgttcattactcggatacagatctaaagatatatgtcagtcttgcaggtattacatttcccagacgagcgtctgcgcaaagtcgcggcgccggtaaaagaagtcaatgcagatatccagcgcatcgtggatgatatgtttgaaaccatgtacgcagaggaaggcattggcctggctgcgactcaggtggatatccatcagcgcattatcgtgatcgacgtctccgagaatcgcgatcagcgcctggtgctgatcaacccggagctgctggaaaaaagcggcgaaaccggcatcgaggaaggctgtctttccattccagagcagcgtgcgttagtgccgcgcgccgcgcaggtgaagatccgcgcgctggatcgcgaaggcaaacctttcgagctggaagcggacgatctgctggcgatctgcatccagcacgagatggatcacctgatgggcaagctgttcgtcgattacctgtcgccgctcaagcgccagcgtattcgtcagaaactggaaaaaatggccaagctccaagcccgcgcctaaccgatcaggaaatcaacgtgtctgactctttacggattattttcgccggaacaccagacttcgcagcgcgtcatcttgacgcgctgttgtcatctgagcaccagattgtcggcgtatttacccagcccgaccgcccggcaggccgcggcaacaagctgacgccaagcccggtcaaagcgctggctgaacaacaccaactgccggtatttcagcccaaatcgctgcgcccagaagagaaccagcgcctggtggccgatcttaacgccgacgtgatggtggttgttgcctacgggctgatcctgccacaagcggtgctggatatgccgcgcctgggctgcatcaacgtacacggttcgctgctgcctcgctggcgcggcgcggcgccgatccagcgttcactctgggccggcgacagcgaaaccggcgtgaccatcatgcagatggatgtcggcctcgataccggcgacatgatgcacaagatcgcctgcccgattgagagcagcgacaccagcgccagcctctacgacaagctggctcagctcggcccgcagggcatgttgacgacgctgcgccaaatggccgacggcagcgccacccgcgaagtacaggacgaagcgttggtcacttacgccgagaagctgagcaaagaagaagctcgcctggactggaccctgtccgccgcccagttggagcgctgcatccgcgccttcaacccttggccgatcagctacttcaccatcgacgatcaaccggtaaaagtctggcaggccagcgtgctggcgcaaagcgccaacgcggagccgggcaccgttgtccatgccgacaagcaaggcattcaggtggcgaccgccgacggcatcctcaatctgatccagctgcagcccgccggtaagaaaccgatgtcggcgcaggacctgttaaattcacgtcgtgaatggtttaccccgggtaaccggctgtaagtcaccccactgcccggccgttcatcgccgggccgttattttcttaatgccgatcgttatcagcttcagcctatgaaaaataattacaatctccgcagcatcgctgccaaagccatcggccaggtgctggatcaggggcagtcgctcagcactgtcctgccggcgctgcaaacctccatcagcgacaaagatcgcgggttgctgcaggagctgtgtttcggcacgttacgcgtgctgccgcagctcgaatggtgcattcagcaattgatggccaagccgctgaccggtaagcagcgtacgctgcactacttgctgatggtcggcctgtatcagctgctgtatacccgcatcccggcgcacgccgtgctggcagaaaccgtggaaggtgcggtagcgctgaaacgcccgcagttaaaaggcctgattaacggcgtcttgcgccaatttcaacgccagcaggaagagctgttgcaacgcgccgccaacaatgacagccgctatctgcatcccagctggttactgaaacgcattcaacaggcttatcccgccaactgggaacagatcgtcgacgcgaataaccagaagccgccgatgtggctgcgcgtcaaccgcctgcatcacacccgtgacgcttatctgcagctgctgaacgacgccggcatcgccgcggaaactcatgcagactatgccgatgcagtgcgtttgctggcgccttgcgccgtgaccgatctgccagggttcgccgaaggctgggtcaccgtgcaagatgcctcagcccaggggtgtgtcgatctgttggatccgcaagacggcgaacagatcctcgatctgtgcgccgcacccggcggcaaaaccacgcatattttggaagcggcgccgaaagcacacgtcatggcggtcgatatcgacgaacagcgcctggcgcgagtcaaagagaacctgcagcgtctgcgtttgcacgcagaggttaaactgggcgatggccgcactccgcagcagtggtgcggggacaagcagttcgaccgcatcctgctggacgcgccttgttccgccaccggtgtgatccgccgtcatcccgacatcaaatggctgcgccgcgatcgcgacatcgccgaactcgccgcactgcaggcagaaattctggaagccgtctggccgcatctaaaatcaggcggagtgatggtttacgccacctgttctatcctgccggatgaaaacagcaaccagatcgccgcgttcttgcaacgccacgccgatgccaagctggttgaaaccggcgatgcgcagcggccagggcgacagaatatcccgcatcccgaggacggcgatggcttcttttacgctaagctgattaaaatgtaatgcttcagggcgtgcgtgcgcgccctaagtctttcagtgtgaagcagagaacacgatgaaaataattattcttggtgccggtcaggttggcgggacgctggcggaaaacttggtgggtgaaaacaacgatatcaccgtcgtcgataccgattccggccgcttgcgtcagctgcaggataaattcgatttgcgggtggttcaggggcatggttcccaccctcgggtgctgcgcgaagccggcgcagaagacgccgacatgctggtcgccgtcaccaactccgacgaaaccaacatgatcgcctgccagatcgcctattctctgtttaatacccctaaccgtatcgcccgtatccgcgcgccggaatacatccgcgagtcggagaaactgttcctgccggaagcggtgccaatcgaccatctgatttcgccggagcagctggtcatcgactatatctacaagctgattgaataccctggcgcgctgcaggtggtcaactttgccgaaggcaaggtcagcatcgccgcggttaaagcctattacggcggcccgctggtcggcaatgcgctctcttcaatgcgcgagcacatgccgcatatcgatacccgcgtcgccgccatattccgccaggatcgtccgatccgtccgcagggctcgaccatcatcgaagccggcgatgaagtgttcttcgtcgccgcctcacagcatatccgcgcggtgatgagcgaactgcagcggctggaaaaaccctataagcgcatcatgatcgtcggcggcggcaacgtcggcgccggcctggccgccaagctggaaaaagactacaacgtcaaactgatcgagcggaatcagcaacgcgccgccgaactggccgaacagctgcacgacaccattgtattctacggcgatgcctccgatcaggagctgttggccgaagagcacgtcgagcaggtggatgttttcatcgccatcaccaacgacgatgaggccaacatcatgtccgccatgctggccaagcgcatgggcgccaagaaggtgatggtattgatccagcgccgcgcctatgtcgatctggtgcaaggcagcgtgatcgatattgccatttccccgcagcaggcaaccatctccgcgctgcttgggcatgtgcgcaaagcggatatcgtcagcgtctcgtcactgcgccgcggcgtggcagaagcgatcgaagcgattgcccacggcgatgaaagcacatctaaagtggtcggccgcatcgtggaagacatcaagctgccaccgggtaccaccatcggtgcgatcgtgcgtggcgacgacgtgatcatcgccaacggcaacagcaaaatcgaacagggcgatcacgtcatcatgtttattaccgacaagaaattcgtgccggacgttgaacgcttgttccaaccgagcccgttcttcttgtagaacgaatttattaggcgatggtctataattgcgtagttgttctctgccttgggaggagataaaacttctctccatttgtggcaaagggaaattgctttgttaaacttgagttattaattctgcaaggggtgcgttctatgagtatgttgaaagagtttcgcgaatttgccatgcgcggcaacgtggtcgatctggccgtcggtgtgattatcggtgctgcattcggcaagattgtttcgtccttcgtggccgatatcatcatgccaccgttgggcttactgattggcggcgtcgattttaaacagttccatctggtgttacgtgaagctcagggcgccgtaccggcggtggtaatgaactatggttcattcatccagaccgtatttgactttgtgattgtcgccttcgctatcttcctggcgattaaactgatgaacaagatgcgccgcaagcaggaagaagcgccggcagcgccgccagaaccaaccgcagaagagaaactgctgacggaaatccgtgatttgctgagccagcaacagcagccaaagctgtaaaacagcattaagttacgccaataaaaagccaccgatgaaggtggcttttttaatgccttaaaaccagaaagccagtggtaaattatcgtttgatagtttgccactggcctcccagttaccgcctttgttgtgtttttctttacgccgatagctgcctttgcctttcacattcttttccactcgttggcggaatagcgggtcatgcagcagcgcctcaatggcgttatcttgaatctggcctttagtgtgacgatatttcgtcatgataatgctcctgtaaaaggtagggtaataaaacgagccgataatactgccggcaatataaaaattaaagtgtcgtcagcaatcttttttgcctttatcatcgctggcaccctgttccaaggcttccagaatagaacaatagttgctggtatgggcagtgccgcagcaggcgtcactcaggcgtttcaacgattcgcgcatgcgagtcagctccgccaacttgctttccacttcgctcagtcgcgcatcgacgatcgacttcgattcctggcaggtatgatgttcaggatcaacccggatcgacagcagttcggcgatcgtttccagagtaaagcccaactgtttggcatagcgaataaaacgcagccgctgcaggtcctgctccgtatacagccgataaccgccttcggtgcggacattgtgatccatcatgccctgcttttcatagtaacgcacggtatccggcgtcacttcggcgagcttggccaactgacctatcttgaacattaccgctcctctcgggtgaacttgccatcaagcgcgcgctgatattcgccatgcaagaaatcggtgctcatcccagcctgacgcagccggtgctccagcagtgccatgcgcttgctgagatcgacatagtccggatgttcgctattaatctcttgcagcaagcgggcaacggtcaacgcctctttacgatcttccagcgccggcggcaggtaaccggcatttttcagcaaacggtaaccggcgcgtagctcgggcggcaccgcgctgtcatcttccagcgccagcggctgcccctggcctggcaggttgtcgaactcgcctttatcctgagcatcaaggatatgacgctccgcccattgatcaagcaaccccatgacagacagcctcggttagcctaatgaataagccttagcatagcggataggggcggggatcttaagcactgcaggggaattgcgcacatttggctggatttggacgtaaaaaaaccgggcaagcccggtttttttacgcgtctacagattactctgcagttgctacttctgcttgagactcagcacgatcaaccagctcgatgtatgccatcggcgcgttgtcgcctgcgcggaagccacacttcagaatgcgagtgtaaccaccggcacggctcgcgaaacgcgggcccagctcgttaaacagttttgccacgatctcgttatcacgagtacgggcgaatgccagacgacgattagctacgctgtcggtcttggcaagagtaatcagcggctcaacaacgcgacgcagctcttttgcttttggcagggtcgtcttgatgatctcatgacgaaccaaagagccggccatgttacggaacatagcctggcgatggctgctgttacggttcagttgacgaccactcttacgatggcgcatgaccttatccttctcagtaaaaccttaacctgtgatccggttactcgtcagcaatgcttgccggcggccagttttccaggcgcatgcccagagacagaccacgtgaggccagcacgtctttaatctcggtaagagattttttacccaggtttggcgttttcagcaactcaacctcggtacgctgtaccagatcaccgatgtagtggatagcttctgccttgaggcagttagcagagcggacagtcaattccagatcgtcaacagggcgcagcaagatcggatcgaattccggtttctcttctttaacttccggctgacgcacatcacgcaggtcaacgaaagcttcaagttgttcagccagaatggtggccgcacggcggatcgcctcttcaggatcgatcgtgccattggtctccatttcgatgaccagcttatccaagtcagtacgctgttctacacgcgcagcttcaacattgtaggcgatacgctctacagggctgtagcaggcgtcaaccaacagacgaccgattgggcgctcatcttcttccgaatgaattcgggcagaagccggcacataaccgcgaccgcgctgaactttgatacgcatgctgatagccgcgttctcatcagtcaggtggcaaatcacgtgctgaggcttgacgatttcgacatcaccatcatgggtgatgtcggcagcggtcacagggccaatgccagatttattcagggtaagaataacttcgtctttgccttgaactctcaccgccagccctttcaggttgagcaggatctccaggatatcttcctgtacgccttctttggtgctgtactcatgcagtacaccatcaatctcaacctcggtcaccgcgcaacccggcatagatgaaagcagaatacggcgcagtgcgttgccaagagtatggccaaagccacgctctaaaggctcaagggtcaccttggcgtgcgtcgaactgacttgctcgatatctaccaggcgcggttttagaaactctgtcacagaaccctgcattgtgtcctctctttggtactaagctttacttggagtaaagctcgacgatcaggtgttcgttaatgtccgcagacagatcggtacgttcaggcatacgcttgaacacgccttccatcttagcagcatcaacttccagccaagtcggcttttcacgctgctcagccagctccagagaagctttaacacgagactgctttttagctttctcgcggatgctgactacgtcattcggagatacctgataagaagcgatgttaacaacgcgaccgtttaccataactgctttgtggctaaccagctgacgtgactctgcacgagtagcgccgaagcccatacggtaaacaacgttgtccagacgaccttccagcagctgcaacaggttttcaccggtgttgcccttcaggcgggttgcttctttgtaatagttgcggaattgacgctccagaatgccgtacatacgacgaactttctgcttctcacgcaactgaacaccgtaatcagacagacgcggtttacgcgcaccatgctgaccaggtgcttgttcaattttacacttggaatcgatcgcgcgaacgccagacttaaggaacaggtctgtgccctcacgacggctcagcttgagcttaggacccaaatatcttgccattttctttctccaacaatcctaaaagctgcgttacacgcggcgctttttcggcggacgacaaccgttatgagggatcggagtcacatcagtaatgttagtgatgcggaaaccagccgcgttcagagcgcggatagtagactcacgaccaggaccaggtcctttaaccataacttccaggttcttgataccgtattctttcactgcgtcagcacaacgttctgctgcaacctgtgctgcgaacggagtggacttacgagaaccacggaaaccggaaccaccggctgttgcccaacccaaagcattaccctgacgatcagtgatggtaacgatggtgttgttgaaagaagcatggatatgagccacgccgtcagagacttgctttcttacacgcttacgtgtacgaacaggtgcctttgccattattcaataaccccgattatttcttgatcggcttgcgcggacccttacgggtacgagcgttggtcttggtgcgctgaccgcgtaccggcagaccacgacgatgacgcaaaccacgatagcaaccaaggtccataagacgcttgatgctcagggtaatttcacgacgcaaatcaccctcaacggtgtatttggcaactgcatcacgaagcttttcgatttgctcttcagacagctcactgatcttaacattttcagcaatacccgtagatgcacagatagcctgtgaacgggttttaccgataccgaagatcgacgttaaggcgataacggtatgtttatgatcaggaatgttaatgcctgctatacgggccactatgcactcctactattttatacagcaacaccattctgaaaagcccgttttcaggatactcaaataatgttgcagtgcgacatacaaaagattggctggctaatctagccagctcaacccaactttgcaagaaaaatatgcgagataatcagccttgacgctgtttatgcttcggctcggcgctgcaaatcacacgaacgacaccgttacgcttaacgattttgcagttacgacataatttcttgacggaagcacgaactttcatttttactctccgtaacttctcaaacgaatctgactagcggttatagcctttcagatttgctttcttcaatgcagactcgtactgacttgacatcatcagagtttgcacttgagccataaagtccatgatgacgacaaccacgatcagtagcgaggtaccaccaaagtagaatggtactttcattgcatcacgcatgaactccgggatcaggcagatgaaagtaatgtacatcgcgcccaccagggttaaacgcgtcattactttatcgatatacttcgccgtttgctctcccggacgaattcctggtacgaaggcaccggacttcttcaggttatctgctgtctcacgcgggttgaaaaccaacgccgtgtagaagaaacagaagaagatgattgcagacgcatagagtaacacataaagcggttgccctggctgcaaatacagcgaaatcgtagtcagccagttccaaccggtaccgcccccaaaccatgatgcaatcgtggccgggaacagaataatgctggaagcgaaaatcgccgggataacacccgccatgttcactttcaacggtaagtgtgtactctgtgctgcataaacacgacgaccttgttgacgcttcgcatagttaacgacgatacgacgttgaccacgctcgatgaaaacaacgaagaaggttactgcaaacaccaatactgcaaccaacagcagcaggaggaagtgcaggtcgccttgccgcgcttgctcaatagtatgggccactgccggcgggagccccgctacaatacccgcgaagataatgatcgagataccgttgccgataccgcgctcagtaatctgctcacccagccacatcaggaacattgtcccggttaccaggctcacaaccgcagtaaagtagaatgcaaagcctgggtttaacaccaggccctgcataccaggcatattcggcagaccggtagcaataccgatcgactggaatatggccaataccagcgtaccgtagcgggtgtactggctaatcttgcgacggccagcctccccttctttcttgatttccgccaacgctggatgaaccaccgtcagcagctggataatgatcgacgccgagatatacggcatgatccccagagcaaagatagaagcacggctgagggcaccaccagagaacatgttaaacatttcaatgatagtgcctctctgctgctcaagcaatttggcaagcacagtggcatcgataccaggaatcggaatgaaagagccgatgcggaagacaatcagcgcgccgatgacaaacaaaagtctgcgcttcagctcgccgagcccgcctttagcactttgaaaatctaatcctggttgcttagccatctgctacttattcctcaattttaccgccagcagcctcgatagcagcacgagcgcctttggtgacacgcagaccacgcagggttaccggacgagcgacttcgccagaaagtacaactttcgcgaattcgatctggacaccaactacgttagcggctttcagcgcgttcaggtcgataacatcgccttcaaccagagccagttcagacagacgaacttctgccgtgatcatcgctttgcgtgaagtgaagccgaatttcggcagacgacggtacagaggcatctgaccaccttcgaaaccacgacgtacgccaccgccagaacgagacttctgacctttgtgaccacggccgccggttttacccaggccagaaccaataccacgacctacacgcttaggcgcatgcttggcaccttcagccggagacagagtatttaaacgcatctgttactcctcaactttaaccatgtaggaaaccaggttgaccataccgcgaacagcaggagtatcctcgcgctctacggtgtgaccaatacgacgcagacccagaccgagcagagtagctttatgcttcggcagacggccaattgagctgcgagtttgtgtaactttaatagtcttagccatggtcaattaccccagaatgtcggcaacggatttaccacgcttagcagcgaccatttcaggagacttcatattcgccagagcgtcgatagttgcacgaaccacgttgatcgggttggtggaaccataagctttagccaatacgttgtgcaccccagcaacttcgagaacggcgcgcattgcaccgcccgcgatgataccggtaccttcatgagcaggctgcatgaacacgcgagaacccgtgtgagcgcccttaacagggtgctgcagggtgccgctgttcagcgcgacgttcatcatgttgcgacgggctttttccatcgctttctggatcgctgctggaacttcgcgtgctttgccgtagccaaaaccaacgcgaccgttaccatcaccaactacagtcagtgcggtaaagctgaaaatacggccaccttttacggttttagatacgcggtttaccgcgatcagcttttcctgcagttcgccagcttgtttttcgatgtgagccatcttaaacctcttccttagaactgaaggccagcttcacgggcagcatctgccagtgcctggactcgaccatgatattggaaaccggaacggtcaaaggatactttcgcaatccctttttccaacgcgcgctcagccagagctttacctacggctgctgctgcgtctttgttaccggaatacttcagttgctccgcgatagctttttctaaagtagaagcggctaccagtacttcagaaccgtttggagcaatcacctgtgcgtaaatgtgacgcggggtacgatgtaccaccaggcgggttgcacccagctcttggagcttgcggcgtgcgcgggtcgcacgacggatacgagcagatttcttatccatagtgttaccttacttcttcttagcctctttggtacgcacgacttcgtcggcgtaacgaacacccttgcctttgtaaggctcaggacgacggtaagcgcgcagatctgctgctacctggccaattacctgcttatcagcgcctttcagcacgatttcagtttggcttgggcattcagcagtgatacctgccggcagctggtgatcgatagggtgagagaagcccagggccaaattcaccacgttgcctttaacggcagcacgataaccaacacctaccagttgaagcttcttggtgaagccttcggtaacaccaacaaccattgcgttcagcagagcgcgcgtggtacccgcttgggcccatgcgttagcaaaaccttcgcgcggagcgaaagtcagtgcgttagcttcttgcttcacttcaacggcgtcgtggatagtacgagtcaactcgccgtttttacccttaatcgaaataacctgaccgttgagttttacctctacgccggcaggaatgacgacgggtgcttttgcaacacgagacattctttcctcccgaattaagctacgtagcagataatctcgccacccagaccagcctggcgagctgcacgatcggtcataacacctttagaggtagaaacaacagcgatacccaaaccggccataacttttggcagctcatcttttttcttgtagatgcgcagacctggacggctgatacgttgaatgctttctaccacagctttgccctggaagtacttcagtaccagttccagaacaggcttggcgtcgccttcgattttgaaatcttcaataaaaccttcttccttcagcacgttggcaattgccactttcagcttggaggaaggcatggtgaccgcaactttgttcgcggcttgaccgttacggatacgggtcagcatatccgcgatcggatcttgcatgctcatctgtctttactcccgtgattcaattggtaattaccagctagcctttttcaagcctggtacttcaccgcgcatagcggcttcacgaagcttaatacggctcaacccgaatttgcccacataaccatgtggacggccagtttggcggcagcgtttacgctgacgagacgggctggaatcacgcggcagagtttgcagcttgagaacggcattccaacgatcttcatcggatgcgttcacatcagagataatagctttcagttcagcgcgttttgcaaagaacttgtcagctaatttcacgcgcttgacttcgcgtgctttcattgattgcttagccatcagtaaccctgccttacttgcggaacgggaagttaaaagcagccagcagcgcgcggccttcatcatcagatttcgcagtagtggtaatggtaatatccaaaccacgaacgcgatcgactttgtcgtagtcgatttctgggaagatgatttgctcacgcacgcccatgctgtagttgccacggccatcgaatgacttggcggacaggccacggaagtcacggatacgtggaacagcaatggagatcagacgctcaaagaactcccacatgcgttcgccacgcagagttactttacagccgatcggatagccctgacggattttgaagcctgcaacagatttgcgggctttggtgatcaacggtttttgaccggagatggctgccaggtccgctgcggcgttatccagcagtttcttgtcagcaatcgcttcaccaacacccatgttcagggtgatcttctcgacccgagggacttgcatgacagagttgtaatcaaactgagacatcagttgtttgactacctcgtctttgtagtaatcatgcagtttcgccatcgtattactccaaattacttgatagtttcgctgttagacttgaagaaacggacttttttgccgtcttcgaatctaaagcctacacggtcagccttgccggtagccgcgttgaagatagcaatgttagaaacctgaattgcagcttctttctcaacaatgccgcctggttggttcagagccggaaccggcttctggtgtttcttaaccaggttgatgccttcaacaatgaccttgccagcagacaggacattttttactttaccgcgcttacctttgtctttcccggtaatcacgataacttcgtcatcacgacggatcttcgctgccatgttcgctccttagagtacttctggtgccagagagataattttcatgaacttctcattacgcagttcacgagttaccggcccaaaaatacgcgtaccgattggctgctcgctgttattgttcaaaataacgcatgcattgccatcgaagcgaatgacagaaccgtccgggcgacgtacacccttcttggtgcgcaccactaccgccttcagaacatcgcctttcttcaccttaccgcgaggaattgcttccttgatggtaattttgatgatgtcgccgacgcctgcgtagcgacggtgcgagccacctagaaccttgatacacattacgcgacgtgcaccggagttgtcggcgacgttcagcatagtctgttcttggatcattttagtgctccgctaatgtcaactactactttaaagacccaagtaaaaattaggccgttgaaaagccccataaccgagggcgcagcattataacaccgcttacttggtatgggtagaaaaaataaacggctcattttctgagccgtttattaagtgagagccagctactctattacagaatcgctttctctacaacgcgaaccaacgtccaggacttggtcttggacagtgggcggcattcgcggatttccaccacgtcgccggtaccacattcgttgttctcgtcatgtacgtgcagcttggtcgtacgtttgatgaatttcccgtagatcgggtgcttcacagtacgctcgatagcaacaacgatggatttctccattttatcgctaacaacacgaccctgcagggtacggataacttcagtcatttacacacccgccttttgagtcagtaaagtcttaacgcgtgcgacgtcacgacgcacttgtttcaacaggtgagtttgttgcagctggccactggccgcctgcatgcgcaagttgaattgctcacgcagcaggttgagcagctcggcattcagctcttcaacgcttttttcacgcagctcttgtgctttcattacatcaccgtcttagttacaaaggtggttttgatcggcagtttcgctgctgccagtttgaatgcctcgcgggcaacctcttctggcacgccgtccatttcgtacaggaccttaccaggctggatcagggcaacccaatactccacgttacccttacctttacccatacgcacttccagcggcttctcggtgatcggtttgtccgggaatacacggatccagatcttgccttgacgcttaactgcacgagtcattgcacgacgagctgcttcgatttgacgagcagtcagacggccacggccaacagctttcagaccgaaagtgccgaagctaacatccgtaccttgcgccagaccacggttgcggcccttgtgcaccttacggaattttgtacgctttggttgtaacatcagcgactctccttacttgcggcctttacgctgctgctttttaggttgagcagccggttccggttgttcaactgcagccataccacccaggatctcacctttgaagatccataccttaacgccgattacaccataagtggtgtgcgcttcagatgtgttgtagtcgatgtccgcacgcagagtgtgcaatggaacacgaccttcgcggtaccattcggtacgtgcgatttcggcgccgccaagacggccgcttacttcaactttgatacctttagcgccaagacgcattgcgttctgtactgcacgcttcatagcacgacggaacataacgcgacgttccagctgagaagtgatgctgtcagcaaccaatttagcgtcgagttccggtttacggacttcggcgatgttgatctgtgcaggaacgccagcgatgtccgctacgaccttgcgcagtttttcgacgtcttcacctttcttgccgataacgatgcctgggcgagcagtgtgaatggtcacacggatgctcttcgcaggacgctcgataacgatgcgagaaacggaagctttcgacagttccttagtcaggaattgacgaactttaaagtcgctgtccaggttgtcagcgaattctttggtattcgcataccaagtagagttccaaggtttgacaatacccaggcgaataccattaggatgtactttctgacccattgctagtctccagagtctcagcgatcggacacaaccacagtaatgtggctggtgcgcttcaggatgcgatctgcacgaccttttgcacgcggcataatgcgcttcatgcttgggccttcgtctacgaagattttcgtaactttcagatcatcgatgtcagcgccatcgttgtgttctgcgttagcaatggcagactccagcactttcttaaccagaccagcagctttcttgttggtgtaggtcagagtttccagagcttgcgacactttcttaccgcgaatcaggtcagcaacaaggcgaaccttctgagcagaagaacgagcgtggcgatgtttagcgatagtttccatctcttcctcctaccttagcgctttttagcttttttatcagccgcatggccgcgataagtacgagtcggcgcgaattcacccagtttgtgaccgaccatttcatcggaaacgaacactggtacgtgctgacgaccattatggacagcgatggtcaaaccgatcatgttaggaaagatcgttgaacgacgggaccaagtgcgcaaaggcttcttgtcaccgctttccaccgctttctctaccttcttcagcaagtgcaggtcaataaaaggacctttcttgagagaacgtggcatggcttatcctctaattattttttgctacggcgacgtacgatgaacttatcagtacgcttgttgctacgggtcttcttacctttggtctgaacgccccacggagttaccgggtgcttaccaaagttacgaccttcaccaccaccgtgcgggtgatctaccgggttcatcgccgtaccgcgaacggtaggacgaacaccacgccaacgtgcagcacctgctttacccagaacgcgaagcatgtgttcagcgttaccgacttcacccagggtggcgcggcaatcagctggaactttacgcatttcgccggagcgcagacgcagagttacgtaggaaccatcacgagcaacgatctgaacgtaggcgccagcggagcgagccatctggccgcctttacctggtttcatttctacgttgtgaaccgttgaaccaactggaatgttgcgcatcggcagggtgttacccgctttgattgcagcatcaacgccagattgaatctggtcaccagctttcaggcctttcggcgccaggatgtaacggcgttcgccgtctttgtacagaaccagcgcgatgttcgcggaacggttcggatcgtactccagacgctcaaccacagcagggataccgtctttgttgcgcttgaagtcaaccagacgataatgttgcttgtggccaccaccgatatgacgggtggtgatacggccattgttgttacgaccaccgcttttgctcagtttttccagcagcggggcataaggtttacccttgtgcagctcagggttaaccactttaacaacgtggcgacgacccggagatgtaggtttacatttaacaattgccattgttcttactcctccgacttactctgcgccgccgatgaagtccagattctggccttctttcagggtgacgtaagcttttttccagtcgctacgacgaccaacacgctgaccgtgacgcttcactttccctttaactaccagggtgttcacgtctttgacttcgacttcaaacagtttctgcactgcagctttgatttctgctttggtcgcgtctttggcaactttgagaacgatggtgttgcttttttccatcgcagcggatgctttttcagatacgtgcggtgcacgcagcactttcagcaaacgttcttcacggatcatgccagcatctcctcaacttgcttcacagcatcagcagtcataaccactttgtcgaaggcgatcaggctaaccggatcgatacctgctacatcgcgcacgtcaaccttgtacaggttgcgagctgccaggaacagattctcatccagttcaccggtcacgatcagcacgtcttccagagccatatctttcagtttctgtgccagcagcttagttttaggcgcttctacagagaacttctcgacaacgatcagacgatcttgacgtaccagttcggacaggatgcttttcagcgcgccgcggtacatctttttgtttactttctgactgtggtcctgtggcttagcagcaaaggtcacgccgcctgaacgccagatcgggctctttacagaacctgaacgcgcacggccggtgcctttctgacgccatggctttttgccggaaccagttacttcagcacgggtcttctgagcacgagtaccttgacgggcacctgctgcataagcaacaacaacctggtgtaccagcgcttcgttgaaatcacgaccgaaggtagtttcggaaacagtcagcgcgctttgcgcgtctttcaatactaattccattgctatccccttacgccttcacagctggtttaacgatcaggttgccaccggttgcgcccggtacagcacccttaaccagcagcaggttgcgctcagcgtcaacacgtactacgtccaggctttgaacggttacgcgctcatcacccaggtggccagccattttcttgcctttgaacactttgcccggagtctggttctgaccgatagaacccggaacgcggtgagacaaggagttaccgtgggtagcgtcttgggtacggaagttccagcgcttaacagtgccagcaaaacctttacctttagaagtaccggtaacatcgacttttttaacgtcagcgaagatttctacgctaatttcctgacctgcagcgaattcttgaccttcttccaggcggaattcccacagaccacggccagcttcaacgccagctttagcgaaatggcccgcttccggcttggttacacggttagcttttttgctaccagtggtaacctgaacggcacggtaaccgtcggtgtccaggcttttaacctgagtcacgcggttcgcttcaatttcaattacggttactgggatagaaacgccatcttcagtgaagatacgggtcatacccacttttttaccgactaaaccaatcattgtttcaacctctcaatcgctcaatgacctgattaacccaggctgatctgcacgtctacaccggcagccagatccagacgcatcagagcatcaacggttttctcggttggctcaacgatgtcaaccagacgcttgtgagtgcgaatctcgtactgatcgcgcgcgtctttgttgacgtgcggagagatcagaacggtaaagcgctctttgcgagttggcagcgggatcggaccacggacttgcgcaccagtgcgctttgcagtctcgacgatttccgcggttgattgatcgatcagacgatgatcaaacgctttcaggcggatacggattctttggttctgcatgagaccagagctccaattatttataaacgtaaataattactcctcacacccatttcgattgatgggggagtgtaatcgtcaacatataacccccatatcgggagtattgttcgaaaggcaaaaaaggcctgccaatcgactgattcgctaaaatcaggcttaccaagattaggtaagcccgcgcattatacgcaaaatggcccaggaagcaagccgcagttggaaatatgctcaggaaatcgtcatttttgcgtcttcagcgacgatcacgggatgaaggtggcgatcaaggtatgaattatgcttagcgggcagctcccctgccccaccgtaaaaacggtcgccggcaggagaggcgatgacgaacggaaggcaggcttactctttgcgctctaaaatctgggcttgggcatagttttgaatgccgaggcgagcgatcagatccagctcggtttccagccagtcgatatgctcttcttcatcggccagaatgtcgatcatcaaatcacggctgacataatcgtgaatcgagtcggcgtaggcgataccttcgcgcaggttcttggcgcccgccagctccagcgccagatcggaacgcagcatctcttcaatgtcttcgccgatgttcagcttgccgaggtcctgcagattaggtattccttccaggaacaggatgcgctcgatgtagcgatcggcatgtttcatttcgtcgatcgactcgtggtattccttatcgttgaggcgcattaaaccccaattcttgaacatgcgggcgtgcaggaaatattgattgatggcaaccagctcgttgccgagcagcttgttgaggtgagcaatgatctttttatcgcctttcataggtaactcctcctggccagttctaaaagtgtagaacctgtaagccaagagtcaaaaataaccttaccctttgttaggcaacttcatgcattgggatgatagttccgcgttcctccaccataatctgtcttgcctgacgaatgcactttccacaatcggtaccaatcggcacaagttcacgcagctgcttcatggtatgggggttgtgctgacgcaccgcattacggatcgctttgtcagtcaccgcattacacagacatacatacatagagagactcacttcttaaccaatgcattgagtctaaataggaatggtttttatttcaattaagatttatacgaattgcataaaaaaagggcaccgaagtgcccctttttgtgtcgaaaaattattcgcgattaagcgataactttagcaacaacaccagcgcctacagtacggccgccttcacggattgcgaaacgcagaccgtcgtccatcgcgattgggtgaatcagggtaactttcatgttcacgttatcgcctggcattaccatctctacgccttctggcagttcgatggtaccggtcacgtcagtagtacggaagtagaactgtggacggtagcctttgaagaatggcgtgtgacgaccaccttcatctttgctcaggatgtacacttcagattcgaactgggtgtgcggcttgatggagcctggcttagccagtacctgaccacgttcgatttcttcacgtttgataccacgcagcagaacacctacgttctcaccagcacggccttcgtccagcagtttgcggaacatttcaacgccagtacaggtagacttaacggtgtctttgataccaacgatttcaacttcttcgccaactttgatgataccgcgctcaacacgaccggtaacaacggtaccacgaccggagatggagaatacgtcttcgattggcagcaggaacggcttgtcgattgcacgctctggctctgggatgtagctgtccagggcttcggccagttcgatgattttcgcttcccactcagcttcgccttccagcgctttcagcgcggaaccgcggattactggcaggtcgtcgcctgggaagtcgtaagcggacagcagttcgcgaacttccatttctaccagttccagcagctcttcatcatcaaccatgtcgcatttgttcatgaatacgatgatgaaaggaacgccaacctgacgacccagcaggatgtgctcacgagtctgaggcattgggccgtcagtcgcagctactaccaggatcgcgccgtccatctgagcagcaccggtgatcatgtttttcacgtagtcggcgtgccctgggcagtcaacgtgcgcgtagtgacgagtcggggtgtcatactcaacgtgggaggtgttgatggtgataccacgagctttttcttctggcgcgttatcgatctggtcgaaagcacgtgcagaaccgccgtaggttttagccagtacggtggtgatcgctgcagtcagggtagttttaccgtggtcaacgtggccgatagtaccaacgttaacgtgcggttttgtacgttcaaatttttctttagacacggctatattccttactatagcgctctccccttctggagagagcacgggactttggttttaaccctgcggcttatttgccacgggcttcgattacggcctgagcgacgttgttcggtgcatcatcatacttcaggaattccatggtgtatgatgcgcgacctttagtcagagaacgcagctgagttgcgtagccgaacatttcggacaacggtacttcagcgtggatcttaacgccagtcacttcagattcctgaccgcgcagcatgccgcgacgacggctcaagtcaccgataacgtcaccggtgttctcttctggagtctcaacttcaaccttcatgataggctcaagcagaactggtttcgctttcttaaagccttctttaaaggcgatagacgcggccagtttaaacgccagttcagaggagtcaacgtcgtggtaagaaccgaagtgcagacgaatacccatgtctactaccgggtaaccagccaacggaccagacttcagctgctcctggatgcctttatcaacggcagggatgtattcgccaggaattacaccacctttgatgtcgttgatgaactcgtaacctttcgggttagagcccggctccagtgggtacatgtcgatcacaacgtgaccgtactgaccgcgaccaccagactgcttggcgtgcttaccttcaacatcggtaatcttcgcgcgaatcgcttcgcggtaagctacctgaggtttgcccacgttagcttcaacgttgaattcacgcttcatgcggtcaacgatgatgtcgaggtgcagttcacccataccggcgatgatggtctggttagactcttcgtcagtccatacgcggaatgacgggtcttctttagccagacggcccagagccagacccattttttcttggtcagctttggtttttggttcaacggcgatagagattaccggctcagggaattccatacgctccaggatgattggagagtctggatcacacagggtgtccccggtggtcacgtctttcagaccgatcgcagcggcgatgtcgcctgcgcgaacttctttgatctcttcacgcttgttggcgtgcatctgaacgatacggccgaaacgctcgcgcgcagccttaacggagttcagcacggtgtcgccggagttaacaacgccggagtacacgcggaagaaggtcaggttacccacgaacgggtcggtagcgattttgaacgccagcgcagagaacggctcgtcatcacttgcgtgacgctcagccggagtatctttgccatcgtccaggataccgttgatcgcaggaacgtcagttggtgccggcaggtattcgattaccgcatccagcatcgcctgtacgcctttgttcttgaacgcagaaccacaggtaaccaggatgatttcgttgttcagcacgcgctgacgcagagcggatttgatttcttcctcggtcagctcttcgccgcccaggtatttttccatcagctcttcggaagcttccgcagcggactcgatcaggttctggcgccattcttcagccagatccatcatgtcagccggcacgtcttcgtattcgaaggttacgcctgcgtcttcttcgttccagttgatcgccttcatcttcaccaggtcgataacgccggtgaatttgtcttctgcgccgatagccagctgcagaggaacagggttggcgcccagacgagttttgatctggcctacaactttcaggaagttagcgcccatacggtccattttgttaacgaacgcgatacgtggcactttgtatttgttagcctgacgccatacggtttcagactgtggctgaacaccaccaacagcacagtaaaccattaccgcgccatccagcacacgcatggaacgttctacttcgatggtgaagtcaacgtgccctggggtgtcgatgatgtttacgcgatgcggttcgaactgcttggccataccagaccagaaggcagtagtcgctgcagaagtgatggtaataccacgctcctgctcctgttccatccagtccatggtggcagcgccgtcatgaacttcaccgattttgtggtttacaccggtgtagaacagaatacgttcggtagtggtggttttaccggcgtcgatgtgagcactgataccgatgttacggtagcgtgcaatgggtgttgtacgagccatttgattcctctattcctagggcgttcaagttcagttaacccaagcgggccgatttgacgcgcccgcttggttagcatgactacagccggatgattaccagcggtagtgggcgaacgccttgttggcttcggccatacggtgaacgtcttcacgcttcttaacagcagaacctttgttctctgctgcgtcagacagctcgttcgccaggcgcagagccatggatttatcaccgcgtttacgtgcagcatcaacgatccaacgcattgccagagcattacgacgaaccgggcggacttcaactggtacctgataagtagaaccgccaacgcgacgcgacttaacttctacagtcgggcgaacgttgtcgagagcgacttcgaaagcttccaggtgatctttaccagaacgctgagccagggtctccagcgcggtatagacgattgcttctgcagtagattttttaccgtctaccatcaggatatttacaaatttggccagcagctcagatccgaacttaggatctggcaggattttacgttggccgattacgcgacgacgtggcatggaaatactccgttgttaattcaggattgtccaaaactctacgagtttattttgacattaaagttaaaacgtttggccttacttaacggagaaccattaagcctttggcttcttcacgccgtacttggaacgagcttgcttacggtctttaacaccggagcagtcaagtgcaccacggacggtgtggtaacgcacacctggcaagtcttttacacgaccgccacggatcaggattacggagtgttcctgcaggttgtggccttcgccaccgatgtaggaagtcacttcgaaaccgttggtcaaacgcacacggcaaactttacgcagtgcggagtttggttttttcggggtagtggtatatacgcgggtgcatacgccacgtttctgcgggcaggcttccagcgctggaacgttgcttttagcagccttcacagagcgtggtttgcgaaccagctggttaattgttgccattaaaaaagctcctggtttttgcttcgtactagcttcgtaaacatgtgataaatcccctcgtatgcactactggcaaagtacgaggacgcagaattttatggctgaccagtatgggtgtcaagaaatatacaacatcactctcatcaccaggccatttggctgcggtgttgttcggttaattcaacgaagtgattatagccgacgacagtgattttgtgcgaaaaatgaccaaccaatccccgggcttccaggtcgtcctgcagcgcataaagggatatgggggcggcgagcagcaattcaagatgagcgctgccggcaaggcctgccagcacgccgtcctgcagcagcaacagcgcgtcgccctgcgccgtcaggcgcagcagcgcaggcaggtcacattggtttggcgaatggctcagggtatacagcatcagaggatcctaaaacgtcatcacggcgtcgtagccgtccagttcgcggcgcagctcgtccggcgccagcacctcggcgtccagcacccaatcggtcacctggctcagtccgcgttcctgcagtgaagcctggcacagatagcaccgctccacgtcatacagcggcagcacgccaaaggtggcaatgtaattgcgcgccaaaatcttttccggctgttggcccggcaacagctgcaatacgccatcgccgacaaaaaacacccccacatcttcactgagcgccgacatggcgagcagcgcatccagcccttccctgccgctggcgccgccgtgcggcccatgggtgaaaacaaaagcgactcgtttcatcctatcctcagaactgcaccagacggtcgcaacttagcgacgcttcggccagggaacccaacccgctcagggtaaaaccgggctgcaggttggcgcttgccagcccctgctgcgccgcctcctgctcgtcggtgacgccgcggcgcaacgcggcggccacgcagacgttgagcgccacgccgtgttgctgagccagctgcgcccaaccgcgcaccaggtcgaactcatcgctggcgggcgcggtcagctggttggcgttcaacaccccttcacggtagaaaaagacgctggaaagccggtgtcctttcgccagcagggcctgagcgaactgataggcgctgctggcctgctgcgtgccgtaagccggaccggtgaccaacagacaataatcgagcatcaacggtcgcttcccaacagatcgccgctcttgaactggcggatgtacaaatacacggtgtgtttggagatattcaggcgatccgccacctgattgatcgcatccttgatgtcgaagatgcctttctcatagaggtttagcactacctggcggttcttggcgttattggataccgagcgatcggcattcacctcttcgatggtgaactccagcgtctgcgccaccagatcgtcgactgaagacgcgaaattcaccgacgacggcacgtcctgcgtggccggcggcataaaggtctgcatgatctgcgagaacggcacatcgaggttcatgttgatgcacagcaggccgattacccgctgttcgcgattgcgaatggcgatggtcaccgacttcatcagcacgccgctcttggcgcgggtgaagtaggctttcgacacgctgctgtcgtcgccggccatgtcgtgcagcatgcgcagcgccaggtcggtgatcggcgaaccgattttacgcccggtatgttccccgttggcgatgcgcaccgccgaactgttcaggtcttccagcgcgtgcaatacgatctcgcagtggccgccgatcaacatcgccagcccatcgaccaccgcttcataggatttcaggatttcatgatccgtttgagtaaacggacgttcattcagcaaatcaagttcgctggcttcgctggataaaagcgaattcgacatcgaagataccaccctcatagatcgcctgtgccagggggcgcagctaaaaccgctcggaccggatcgctgccgtcgtcggcacgccgcagcgcggctggctgagagcagcataaacggcacgatgacatccgcgggcgaggcggccgggaacaattttaggtacacgccctaaggggcagacgcatgactgataagtcagaattattagtctagcaaagcggccggagcaaagtccttgcgtttgcgcgtggtattgacgttaagcccgatgcccggcaggcgtcaagcgttcaatggagagagaagcggcggcggtcgaaatgaaaaccgccgcggagggcatccgcggcggtggcaaacagagcgacgagattatttcgctttagcgtctgctttcgcgtcagccgatttttcggctttagcgtcggctttcggcgccgctttcacgtccagcagctcaacgtcgaacaccagcgtggagttagccgggatgcccggaacgccggttttgccgtaggccaatgccggcgggatcaccagcttgattttgccgcctttcttgatgtgcttcaggccttcggtccagcccgggatcacgccatccagacggaacgacagcggctcgccgcgggtgtaggagttatcgaactcagtaccgtcggtcagggtgcctttatagtttactaccacggtgtcgctgtctttcggcgcttcacccgcgcccggtttctctacctggtacagcaggccggattcggttttcttcacgcctttttctttcgcgaagctgtcgcggtacttggcgcctttggtttcgttgtccttggcgtcctgttccatcttcgcctgagcggaagccttcacgcgcgcttcgaagccctgaagggtcttctcgatgtcggcgtcgttcagcttgctcttgttggcgaacgcgtcctgaacgccggcgatcagctgatctttgtccagcttgatgcccagcttctcttgctctttcagagagttgtccatgtaacggccgagagaggcgcccagtgcgtaagcggcttgctcgtcgtcgtttttgaacttgccggtgctcggtgctgccgccgcgtccgctggtttagcggcttctgccggtttggcggcatcggctgccatgacctgggtcgcattcagagcaaaagccatggtggttgccagaagcgtgactttaaacaaagatttcatccatttctccagtgtctgaagcaatgccccaaacaatcattaggtaagataaccgggctactatagctgcctgaaacaaaacaaaacagtcgcacaggtaaccaatcgagtcaaagtgtgactcccgctttgccaagaagtttccctctgtgtgctactcgcatgataaatcagatttttcttgcagaatattcggcgaggttagcaaaaaacggcgtatcgggcgtgcaacttttcagcactttacactgccgatcgcaacgttgcgcgccacctggagaaatagcgcgagcaaacccggcatcagctgttaccatagcgccgaatcaggattttatcgcgtcagaggtagcctcatgcacaacgccgacattcaacgcctgctacagcggcttgaagaactggagagccgccaggccttccaagagctcaccatcgaagagctcaaccagaccgtcatccagcatcaaatggaaatgctgaagatgcgcgaacacctgcgcatgttgaccgacaagctgcgctcgacccaaacctcaatgatcgcctcgcaatcggaagaaacccctccgccgcactattgagggcccgctgctcggttatttcaggcgtgccagcccgtcgacggcacgctcgagatagcggcgcgggcaccccaggttgatgcggataaaaccgctcccctgcgggccgaaaccgcagcccatcgacggcgccagcttcgccaccgccaccagcgcctgctgtaagtcagcatcgttcaaacccagtgcacggcaatccagccaggcgagataagtcccttcagcctgggtcatcgtgcaccagggcgcggcggccgccagcgcctgctcaaaccagcgccgattctccgccaggtagtcgagcagctcatcaagccaggcagcgccccgttgataggccgcggtcgccgccgtcatcgacagcgcgttgaatacatccagcccgtgggcgttcagccgatcgacaaacgcctgccgcagccgggcattggggatcaggaaattcgaaatgcgcagcgaagagagtccgaaggttttgctggcggacgtcgccgcaatcacccgctcgcgatattcctcgtccagatgcaacaccgatgtaaacgtctcgccgggcagcagcagatcggcccaaatttcatcggagatcaccgtgacatcgtgggcgtggcagatcgccatgagccgctccagttcctcgcggcgccagcaacggccggtcggattgtgcggattgcacagcaacaacagcggcggtttgcgctgcgccaggcaggcggccagccggtcgaaatcgatccggtatccctgcggggtttccagcagcggattttcaatcacctctctgccgttcatggtgactatcttggcgaacgagccatagtacggcccctgcactaccacgccgtcccccggcttgctgagcagttggatcagcatcgccaaccccggcaccaccccttcaatcgacgtgaaccactcgcgccgcagcggcaagtcgtgccgcttggcaaaccagtcgatcgccgcctggtagtaggcgtcgtcgcgttcgctgtagccaaagacgccgtggtccacccgctgatgcagcgcctgttgcacctccggcgggcatggaaagtcgaaatcggacacccacatcggcaacaattcgctgccgtccagttgcagatagcggtcgatgaagtcccacttcacggagccggtattgtggcgatcgatgatggcgttgaaatgactcgtcatgtcaggcttccttacgctgcaagtcgttctgaggttggagtttggcgataccgaagccggtgaagccataaatcagggcgaacaccactgcgacataacattggatcgcccacggcagcagatcgagcgtgctcactcccagcgtggtcgccatgtaaataccggcggccgtccacgggatcagcggctcgatgacggtgcccgcatcttcgacggtgcgcgacaggtttttgttgtccagccccatgcgtcgataggcccctttgaacagctccgccgggatcagcagcgccagcttgccgtcgctggtcgcgccggtcaccaggatggtggtggcaacggtagcggcgatcagctggccggtggtgtgcaccactttcagcagccggctgatgatcaccgtcagcgcgccggtcagcgtcaaggcgccggcgaaggaaaaggcgcagaacaccagcaggatcgtactcatcatcgagaacatgccgccgcggttcagcaggcgcggcacatcggcgacgatcccttcaacgttatggccctggctggcgaacatcgacagattgaaaccgtccatcaacgcattcagcccctgttgcaggctaaaaccctgcagcgcgacgccgatggcgatcgccagcgcgcaggcggccagcatgacggggatcaccggccgtttggtcaccgcgccccacagcaccagcaccggcggcaggatcaacagcagattgaaatggtacaacccctcaagcgcgctgacgatttcggtcactttttccggcgttgccacgctgcccaccgcgccggtgtggccggcgatcaggtacaccacggcggccaggatgaaactcggcagcgtcgtgtacatcagatgctggatatggctgtagagatcggtatccgcgacgatagccgcgaagttcgtcgaatcggacaacggggaaattttgtcgccgaagtaggcgccggacaccaccgccccggccgcggcggccagcggcacgtccagaccggcggccacgcccatcagcgccacgcccacggtgccggccgccccccacgaggtaccggtgcacaccgagatcacgctggtgatgaagaacgcggcgatcagaatgtattgcgggctaatcagcttcagcccccaatacaccatgtaagggattgtgccgctgatcatccaggtgccgatcagcccgcccacgcagatcaggatcatgatcaccggcattgccttagccagcttggccacgatggccccgatgatgtcatcccagcggtagccttgccaccaggccaacgcggcggcgatggcggcggaagccagcagcagcggttcaatgcgcaggccaaactggccatagccgatgatgagcagcaacagcatggccacaatcggcagcgtcgccagcccaaggttgagcgttttcttattatccatatacggctcctgttgaagagggggtactgcaacagcgtaatggcttcggtaatcggaggatgtgagcgcaggccactggccatgtaatcggtttcatgagatggcgttatgtgagccgcctctcattcgccgcgcttgctttgctcagtcctctcaccatcggcgacggagtctcgcaggataagttcggccgaaaagcggttgttctgcggcgcgacgtcgctgccgctgtggatttgtagcgccagacgcgcggcgcggcgggccattttttcgatggggtaatgcacggtggtcaacgcggggtggagatatttcgccagggcaatgtcgtcaaaaccgacgattgacagcgcttcaggcaactgaacttgccgttggtggcaggtgcgcatcatgccggcggccatcacgtcgttgaacgtcactgcggcggtgaagcgttggtcgctggccagaacgcgctcggccgccagttcgccccctctttcattgaagggcacgctgatgatccagctgccgggcacctcaatgccgccggcggccatggcctggcggtaacccgctaaccgctgcgcgcggtcgtcgatcggcagatccgtcgtcacgcaggcgattctccgatgcccctgacgaatgagcagcttggtcgccgtctgcgccgcattggcgttgtcgagccagatgcaacggttggcgatggcgggcaggtaacggttgatcagcaccagcgcgggcgtgtgggcggcgtagcgcagcagctcctcctcccccatgcgcgtgacgtgcgccacgatggcttcgcatccctgattgatgagaaagtcgaggccgcttttttccagttcggcctgatgcccgccgctgcacaacatcaaacgcacgccggcctgtcgcgtgatgtcttccacgccccgcgccaggcgtgaaaaaaacggatcgtcgaggttgccggtcagcaaccccagcatattgccgcttcttttcgccagcgccagcgcggcggcgttgcggtggtagttaaactcgcgcatcgccttctcgacgcgttcgcgggtcaccggttcaacgtaggcggtattattgatcacccggctgacggtggccgtggaaacgccggcgcgccgcgcaacgtctttcatggtggccatggcatgtcctgttgtgccgttcggcgcccggtgcgccgcgcataaaaaagggcagccgatggccgccctcttgtctcgtgatcgcgttctgcttagtggcagccgcaaccgccgttaccgcaaccgcctttaccgtggtcgtgaccatggtcgtgatcgtggctgtggccgtgaccgccgcagcagccttcaccgtgttcgtggtgatggtcgtgctcgccgtgtacgtgaccgtgtgccagttcttctgcggtcgcttcgcggatcgcgacaacttccacgttgaagttcaggttttggccggccagcatgtggttgccgtcaaccacaacgtggtcgccgtcaacttcggtgatttcaaccggtaccgggccctgatcggtgtcagccaggaaacgcatgccgacctgcagttcgtcaacgcccatgaagacgtctttcggtacgcgctgcaccaggttttcgtcgtagttgccgtacgcgtcgttcgcgccgacgtgaacgtcaaaacgatcgccaacgtcgtggccttcgagcgctttttccagacctgcgatcagagaaccatgcccgtgcagatagtccagcggtgcgctcaccggagactcatcaaccaaaacaccgtcttctgtacgtacttggtaagccaggctgaccaccaagtcttttgctactttcatgatatctcctaccgttggctactaggacgcgcaccgttatcgggatgcgcgccttttccggacagattgtaacggaaatctgcctcgctgtaccctccgggataaaaaaacgctacttcggctgaaaaatgccgatcacctgctcttgcgggcgaacgtgtttttccacctgttgctcggtctggcgctggtgatgaccgcacttgacgcactccaccacttccacctgatcctcccgccacaccgccagcgtatccatggcgctacagcttgggcacaccgccccggcgataaatctcttacgtgttgcagacatcattatgctcccgcttattcgtattcatcccagccgtcaaactggcgactttctttttgcatttcgcgatggaacagctcttccagctcgcgccgcgcctctttcacgcgggaaatttgcgccacgtcgccctgatgcggcggcatcagttcacgcagcatgcgcatatccaggcggcggaaatgctgctgggcgcggaaggcctgatgggggtgcatgcccaactccatcaacgccttgcgccccagttccagcgcgctggagaaggtttcgcggctgaactgtttcacgcccgcctgcagcaactcatgcgcctccacgcggccgcgtgcccgcgccagaatactcagattcgggaagtgctgctggcacagccgcacgatctccatggtgtcttccggctcattgcaggtgatcacgatcgacttggccttttcggcgcccgccgcgcgcaacagctccaactcggtggcgtcgccgtaataaacctgatatccgtaacgccgcagcaccccgacggcgctgacgtcgcgttccagtacggtaatgcgcattttgttggccatcaacaggcggccgatcacctggccgaaacgcccgaagccaacgatgatcacctgaggatcgtcgtcctctacgtacggcgtctcctcgtcttcgcctttggcgttatagcggcgcgccaaaatgcggtcgatggcctgcatgagtaacggtgtggtcatcatcgacagcgtcactaccaccaacagcaaagagagttgatccggctgcagcaccttttgcgcgcccgccgcagaaaacagcacgaaggcaaactcaccgccctggctgagcacgccggcaaactgcaggcgcaccgaactacgcaggccgaacaggcgcgacacgccgtagagcacgccggatttcaccgccaccagcgccagtacgccgatcaacacctcggccagatgggtgtagagcacgccgatattcaacaccatgcccaccgagataaagaacagtcccagcagcagccctttaaacggctcgatggagatctccagttcgtggcggtattcgctctccgccagcagcacgccggcaatgaaggtgccgagcgccatcgacaggccaagcgtctccataaacagcgccgagccgagcaccagcaacagcgccgcggcagtgaagatctcgcgcacgccggaagcggcgatatagcggaacagcggccgcagcaggaagcggccgccgatcagcatgccgccgaacgccgccaccttgagcgcgatcttcgcccagtcgtcgctggtgccgccggcgccggccagaatggggatcaacgccagcgccgggatcaccgccatatcctggaacagcagcaccgagaaacccagctgcccgccttcgttgcgattcatgcccttttcgcgcatcagctgcagcgccatggcggtggaagacatcgccaggccgataccgccgatcaccgccgcctgccaggcgaagtgcgtcaggtacagcaacgcgcccagcaccgccgcggtgatcaacacctggccggcgccggcgccgaagatcgagcgccgcagctcccacagcttgctgggattcagctccaggccgatgatgaacatcaggaacaccacgcccaactcggagaagtgcaggatctcgtcaacgtcgcgaatgaagcccaatccccacgggccgatggcgataccggcgatcagatagcccagcaccgcgccgatccccagacggcgggcgatcggcaccgtcaccaccgcggcgaacaggaacagcaaaatggcggtcagtaaggtcgatccttccatgatcatcgtcctccgtgcggcagcgggtggctcagccagtccccgtaggcgtccgcatggctgcgcagcacctccggcttttgccgccgcgcccaatagaccacgaacggcgtcaaccagtgcatatggcacatcccggcggtcagctcgaacggccgcaggatatcttccatcggatagtggttataaccgccggtacgataggcgccttccggctcgccggtggtgatcaccgagcgccagtacttgcccgccagcgcattgccgcccacgccgctggcgaagccgcgcgccagcacgcgatccagccactccttcagcagcgccgggcagctgtaggtataaagaggatgctgaaacacgatgacctggtgctcacgcagcagctgttgttcgtgatggatatcgataaaaaaatcaggatagtgcgcgtagagatcgtgcacggtgacatgttccaactgctgcgccggtcgaagcaaaacccggttcgccaccgagtcatgagattccggatgggcatacagcagcaagaccttgggcggctgcgacatcattcccctccaaagcgtcgtcagggtagcggttttccgttaccatgcatcgcaaagacaaaaacagcgcgcggtgcgcgttctgttaccttaatgataatttaacatactctgaacatacggcgctttatgattgtattctcctcgctacaaatccgacgcggcatccgcgtcctgctggacaacgccacggcgacggttaatccaggtcagaaggtcggcctggtgggcaaaaacggctgcggcaaatccacgctgttgtcgctgctgaagggcgagatcgcggcggacggcggcagcttcaccttccccggcaactgggcgctggcctgggtcaaccaggagacgccggcgctggacgtgccggcgatcgagtatgttatcgacggcgaccgcgagtttcgccagcttgaagccgagttgcaggcggccaacgatcgcaacgacggccacgccatcgccaccctgcacggcaagctggacgccatcgacgcctggaccatccgttcccgcgccgccagcctgctgcacggcctcggcttctccaacgaacagctgcaaagcccggtgcgcgacttttccggcggctggcgcatgcgcctcaacctggcgcaggcgctggtgtgccgttccgatctgctgctgctcgacgaaccgaccaaccacctggatctcgatgcggtgatctggctggagcgctggctgaaaagctatcccggcacgctggtgctgatctcgcacgaccgcgacttcctcgatccgatcgtcgacaagatcctgcatatcgaacagcagacgatgaacgagtacaccggcaactactcgtcgttcgaacgccagcgcgctaccaagctggcgcagcagcagtcgctgtatcagcaccagcaagagaaagtggcgcacctgcaaagctatatcgaccgtttccgcgcgcaggccaccaaggccaaacaggcgcagagccgcatcaagatgctggagcgcatggagctgatagccccggcgcacgtcgacaacccgttcaccttcagcttccgcccgccggaaagcctgccgaacccgctgctgcgcatggaaaaagtcagcgccgggtatggcgataaagtgatcctgaagtcaatcaagctgaacctggtgcccggctcgcgcattggcctgctcggccgcaacggcgccgggaaatcgacgctgatcaaactgctggccggcaccctggagccgctgagcggcgagatcggcctggcgaaaggcatcaagctgggttacttcgcccagcatcagctggaatttttgcgcgccgacgaatcgccgctgcagcacctgagccgcatcgccccaagggtgctggagcagcagctgcgcgactatctgggcggtttcggcttccagggcgacaaggtcagcgaaatgaccgagcgtttctccggcggcgagaaggcgcggctggtgctggcgctgatcgtctggcagcgcccgaacctgctgctgctcgatgaaccgaccaaccacctggatctcgacatgcgtcaggcgctgaccgaggcgctgatcgatttcgaaggcgcgttggtggtggtatcgcacgaccgtcacctgctgcgctccaccaccgacgatctgtacctggtgcacgatggccaggtcgagcctttcgagggcgatctcgacgattatcagcagtggcttgtcgacctgcagcgccaggaaagccagcaggacgcgccggaaaaagagagcggcggcaacagcgcgcaggcgcgcaaggatcaaaaacgccgcgaggcggagttccgtacgcaaacccaaccgctgcgcaagcagatcgccaagctggaacagcagatggaaaaactgggcgccgaactggcggcggtggaggaacagctggcggatcccgcgctgtacgacatcagccgcaaggccgagttgaccgactgcctgcaaaagcaaagccaagccaaatccgcgctggaagagacggaaatgacctggctggatgcgcaggaacagctggagcagttaacgcaggcgttcgaagcctaagcctcaggccttgtaaaaaggtttatcccccagaatggtcgcgcggtgcatgatgcgccgctgcggcagataatccgcgttggcgtagtgctgcgtcacgcggttatcccagatcgccacgtcattttcctgccagcgccagcgcacctgaaactccggcttagtgatgtgagcgaacaggaaattcagtaaagcatcgctctccttcggctccacatccacgatccgcgtggtgaacccttcattgacgaacagcgcctgtcggccgctgaccgggtgagtgcgcaccaccggatgcagcagcggcggatttttctgcaccgccagttgccaacgctggtgttcttcttcgctaccgcgatgtttgtgctccgggaacgacttggtgaagtcatgctctgcgcgcaaccccgcgagcagcgttctgaacggcgccgacagcgcttcgtaggccgcgatgccgctggcccacagcgtatcgccgccggtggcaggcaaggtcttggccgccaggatcgcgcccagcggcgggttctcgataaaggtcacgtcggtgtgccagttgtcgttgtccggcggattgtcgtcgtgagtatcgagcacgatgatctcttccacgtcggtggcatgcggatagaccggatggatatgcagatcgccgaagcgcccggccagatcgcgctgctgcaacggcgtgatcggctggttgcggaagaacagcacctgatgcttgagcaacgcatgataaagctgttcaaactggccgtcgcccaacggccgggccaattcgacgttttccaccagcgccccgatgtaaggccccagcggggtgatattcagacgttcgttcattgctgtactccatgccacggggtcaatcggcgctgcagggcgcgcagccccagctccaacccaaatgcaatcaccgcaatcacgccgatgccggccaacaccacgtcggtcgccaaaaactcaccggcggattgcaccataaatcccaggccgcgcgtggcggcgatcagttcggcggccaccagcgtcgaccagccgacgcccagcccgatgcgaatgccggtcaggatctccggcagcgcgctcggcaacaccacgaaacgcagcacctgccaacgcgtggcgcccaacgcgcgggcggcgcgcacccgcacctgcgccacgctgcgcacgccggccacggcggagagcgtcaccggcgcgaaaatcgccagataaatcagcaagatcttcgaggtttcgccgatgccgaaccaaatcaccatcagcggcaaatacgccaacggcggcaccggacgatagatctcaatcagcggatcgaggatgccgcgcaccgtgtcgttcaaccccatggcgatgcccaccggaatgccgacgatcaccgccgccagcagcgccaccaaaatgcgccccaggctggccgccagatgctgccatagcgtggcgtccataaagccttgcgggctggcgatggtgatcaactggtgcagcacctgctgcggcgccggcaaaaatagcgggctgatcagctgcagcgccgtcacgccccaccagacgaccaacaccgtcaacagcgtggcgccgctcaaccaaacgttgcgcggcacgctgaaacggcgcgtcgctttgccctgcggctgggctgcggccttcatagtggaatgcaggctcatagcaaggcctcgcgctgttggaaaactttgcccagcacgtattcgcgctgcgcgataaattcaggatcggacttgatggcgcggcaggcttcgccgtcggcatagcgctggccgaagttcagcgacagccgctccaccacctgccccggccccggcgacagcagtaacagttcactggcgaggaacaccgcctcttcgatatcgtgggtgatcagcagcacctgtttgccggtatctcgccagatggtcaacaacaactcctgcatctgctcgcgcgtgaacgcgtccagcgcgccgaacggctcatccagcaacagcagacgcggatcggcggccagggcgcgggcaatgccgacgcgttggcgcatgccgccggaaagctgccagatgaaatgccgctcgtaaccggccagccccacgcgctgcagcatctgctccgccacctggcggcgctgcgccttgccgacgccggccagctgcaggccgaactcaacgttgtccaccacgttacgccacggcagtaagccctcatgctggaacaccacgccccgttcggcgcccgggccgtgaacgggcgttccatccagcgtgatgctgccagctgaaggctcgataaacccggcgatcaaattcagcagcgtggtcttgccgcagcccgatgggccgagcaccaccaccagttgcccggcggcgatctggaacgacacgtcacgcagcgcgggccgcccctgatactctgctgaaagatgattgacgtttagcatcctgcttccttacgactgcggcgcagcctgcacctgtttcacaaaacggtcggtgacgtaagcgctgtagtcgctgtcgacctgcgggatcttgccctgctgcttgaggaattcggcggtatcgcggattgccttgtccaccggctggccgagttgggctacctgatcggccaccggcagatatcggttccccttcaccagttccggcacctgcgcttccggcacgccgctcaggcgcgccagcgtgctgagatggctcggatctttcagccactgttccggtgccgccaggtaggccttttgcgcctgcagggcgctggcggcaaaggcggttactacgtcgggatgtttctctgcgaagtctttgcgcaccacccacacgtccagcgtcggcgagccccattcgcccacctgcgcggagtcggtcagcaccttgccctgtttggccagttcgttgaccaccggcgcccagacgtaagcgccgtcgatgtcgccgcgctgccaggcggcggcgatggccggcggctgcagattgaggatcttcacctgttcaggcttgatgccccaatgtttgagcgaagccagcaggctgtaatgggtggtggaaataaacggcaccgcaatgcgcttgccgatcagatcctgcgggcttttgatgtcattcttcaccaccagcgcttcggaactgccgagctgcgaggcgatgaggaacacttcgatggggagtttctggctggcggccaccgccagtgggctggagccgatattgccgatctgcacatcgccggaggccagcgcgcgcagcacgctggagccgctgtcgaacttacgccagtcgacggtcgcgccggactgtttggcgaagctgttttccgcctgcgccaccttggccggctccgccgacgtctggtacgccacggtcacgtccaccgcgtaggcgctggccgcgctgagcgacaacgccagcagcgccgcgttgcgtaaagaaaagagtttgcccgccatgttccgctccgttgataaaaatctgttcagttgctgacagttttatctgagcgatgacgggcgataaaagaataaaaaagtcttctttattaccctaggtaatattaaaacggatcacagcgcgatcgtcccgtgcaagaacacgtgagcgtagccgcccagcagcgtgcggtccccttgcagttcgcagaacagctcgccgccgcgcgccgaaatctgccgggcgtgcagccgatggcggccgagacgcgccgtccagtagggcatcaacgtgcaatgcgcggagccggtcaccggatcctcgccgccgtcgagcgtgaaatagcgcgaaacgaagtccacggtgtcacccggcgcggtgacgatcactgcgcggccggccaatgcgatcagcgccgggatgtccggccgcagcgcgcgcacctgcgcctcgttttcaagcaccaccagcagcgctttcgcctgccacacttcctgtggctgcacgcccagcagcgccgcgaggcctgccggttcggcgactttctgcggcggcctggcggggaaatcaagcaccagccgctccccgtcccgctcatcgcgcttgacgaacagctcgccgccggccgatctgaagcgaatatccttcagcgccgggttaaccgcgctgaacatcacatgcgccgccgccagcgtgccgtggccgcaaagatcgacctcgcgttccggggtaaaccagcggatggcggtcatgtcgccgtcatcccagacaaagctggtttccgacaggccgatctcgttagcgatcgcctgcagccgctccgccggcagcggctgcgtcagcaggcagaccccggccgggttgccgcgcaacccttcgccggtaaaggcgaccacgtgataatagttttccgccatcgttcactccttaatgccagatcagtaacacacaggctgcagtcaacaaccccatggaaacgttgaagataacccaggcctttttactgcgcagcaggcgaccgatcagggtgccgaacgccagccagataatgccggcgacgatgttcaccaccacaatgcccagcgcgatcgccgcaatggaaccgttgtacttatcgcccgccaggctgaagctcgccaccgcccccagcgccatcagccaggctttcgggttgaggaactgcagcagccagccctgatacagccgcaccggctgcggcggcgccacgtcggtttccagcttttcataggcggcggtggcgactttccacgccagccacagcaggtacaggctgccgaggattttcaggatcaggtgcagcgacgggtagaccaggatcaggctgccgacgccgaacgccaccagcagcaagatgctttgcatgccgagcatgatgccgaccatcagccacagcgatcgcataaagccgaagttagcgccggaggtggtcagcagcagattattggggccaggcgtgatggcggcgacccacaggaagcccagcatcgaaaggaataaactcggttccatggcacgggtgctcctcacccaaggcgcttttttgcagtatcattgataattcttggtattgaagctaacagtgcgctagggatctcacaatagccgcccacaacattttactcagcctatgcctaacacctttcgccctctgacaggggccagtaacccgcacctgcaaacgctgttgccgcggctggtgcgccgccgcgtgttattgaaaccgcattggcaacggctggaattgcccgacggcgatttcgtcgatctcgcctggagcgaggatccggcgcaggcgcgcgacaaaccgcgtgcagtgctgtttcatggcctggaaggcagcttctacagcccctacgcgcacggcctgctcaacgcctggcgcgagcgcggctggctcggggtggtgatgcactttcgcggctgcagcggcgtgcccaaccgcaagcagcgtatctaccactccggtgaaaccgaagacgcgcgcttctttctgcgctggctgcgcgatagctacggcgaggtgccgaccgcggcggtaggcgtttcgctcggcggcaacatgctggcctgctatttggcgcaacaaggcgccgacagcctgctgcaggcggcggtggtggtctcggcgccgctgatgctggaaccctgcgcctaccgcatggagcaaggcttctcccgcgtttatcagcgctacctgctggggcagctgaaacaaaacgccacccgcaagctgttgcactacccggacactctgccgctcaaactgtcacagctgaacgggttgcgacgcatccgcgaattcgacgacgccatcacctcgcgcattcacggcttcagcgacgccaccgactattatcgccgctgcagcgccctgccgctgttgccgtctatccagacgccgctgctgatcatccatgcgaaggacgaccctttcatgacccctgaggtgatccccgacgtcgccggcctgccgcgcaatatcgaatatcagctgactgagttcggcggccacgtcggcttcgtcggcggcacgctgaaaaaaccacacatgtggctggagcatcgcattccggcctggctttccccttatctggacattccgacgtgattattccctggcaagaactggcaaccgacaccctgaacagcctgatcgaatcctttgtgctgcgcgaaggcaccgattacggcgaacacgaacgctcgctggagcagaaggtggaggacgtgcgccgccagctgaaaaacggcgaagtggtgctggtgtggtcggaactgcatgagagcgtcaacatcatgccgcgcggccaattccgcgccgggcaggaagaaatttagtggcgcccggttctatgactgacggaaaaaatcaggtaacaatgggacattgcaaaccagcgcgcgccattttttcctgacatagagagcgtcaacaagagccacaataatcccctgacgccggcgcattcaacacggagtgacaaccatcatgtctgccaaacatcccgttatcgcggtgaccggttccagcggcgccggcaccaccaccaccagcgtggcgttccgtaaaatcttccagcagctcaatatccgcgccgccgaactggagggcgacagcttccaccgctatacccggccggaaatggacgcggcgatccgcaaggcgcgcgatctgggcagacacatcagctatttcggccccgaggccaacgacttcggcctgctgcagcagagctttatcgactacggcaaaaacggcaccggccgttcgcgcaagtacctgcacacctacgacgaagcggtgccctacaatcaggtaccgggcaccttcaccccgtgggagccgctgccggcgccgaccgacgtgctgttctacgaggggctgcacggcggcgtggttactgagcaccatgacgtggccaaacacgtcgatctgctggtcggcgtggtgccgatcgtcaacctggagtggatccagaagctgatccgcgataccggcgaacgcggccactcccgcgaagcggtgatggattcggtggtgcgctcgatggaagactacatcaactacattacgccgcagttctcgcgcacccacatcaacttccagcgcgtgccgacggtggacacctccaacccgttcgccgccaaggccattccctcactggatgaaagcttcgtggtgatccacttccgcggcctggaccagatcgacttcccctacttgctggcgatgctgcagggatcgtttatctcgcacatcaatacgttagtggtgccgggcggcaaaatggggctggcgatggagctgattatggcgccgctggtgcaacggttgctggaaggcaagaagatcgaataaatgcgttgagcgcggcgccggccgcgctccgcctcgattacgccggttggcggatctcgaagctgtgggttaccgtggcggccttgttgagcatcagcgccaccgagcagtatttctccgccgacaggttcaccgcacgttcgacgatcttgtcggtcagatcctggccggtcacgatgaagtgcaggttgatatgggtgaacaaccgcggggcttcttcgcggcgctcggaggtcagcttcacctcgcagtcgcgcacgtcgttgcgccccttttgcaagatggataccacgtcgatcgcgctgcagccgcccaccgacatcagcaccatctccatcgggctgggcgctttatcaccggcgttgccgtccatcagcacctggtggccggaggccgattcacccaaaaacgttaacccttccacccacttaactcttgcctgcattctggtcactccggttgatttcttaaaatcagagtacgctttcgcatagaaacaggcaacgtaacctgatgctaatcatgctgaagcgagacaacacgagacacccgccttactctgtgctacaaacagagccgcaataaatctttccgggacactgaatttcagggaaacgcccagagaaaggctcctttaccggtatgttaacagaatgtagcttgcagcgcttacggcaagttaatatgctagagcgacagcgtatttttatgacacgcctcaaaacttgccggtagccctcgctcataactgcggctacaggcgggttttacagggaactctgacccctgtgacacaaggcagcgataacaacagaggataacagcgaatggttctcggcaaaccgcaaacagaccctactctcgaatggttcctgtctcattgccatatccacaaatatccatcgaagagtacgctgattcaccaaggtgaaaaggccgaaacgctttactacatcgtgaaaggctccgtcgcggtgctgatcaaggatgaagaaggtaaagagatgatcctgtcctacctcaaccagggggatttcatcggcgagctcggattgttcgaagaaggccaggagcgcagcgcctgggttcgcgcgaaaaccgcctgtgaagtggccgaaatttcctacaagaaattccgccagctgatccaggtgaacccggacatcctgatgcgtctgtccgcccaaatggcgagccgcctgcaggtcacctccgaaaaagtgggcaacctcgccttcctggacgtgaccggccgcatcgcgcaaaccctgctgaatctggcgaagcaacctgacgccatgactcacccggacggcatgcagatcaagatcacccgtcaggagatcggccagatcgtcggctgctcgcgtgaaaccgttggccgtattctgaaaatgctggaagatcaaaacctgatttccgcccacggcaaaaccattgtcgtctacggcacccgttaatccccgaagaaacggcgcagtctgcgccgtttttttatctgctccctgccatgtggcgccgcctgatctaccacccggaaatcaactacgcactgcgacaaacgctggtgttgtgcctgccggtgctgttcggcttgttgataggccagctgcagctcggcctgatgttctctctggtgcccgcctgctgcaatatcgccggtctggacacgccgcataagcgcttctttaaacggctgatcgtcggcggcttgctgttcgccttcagcagcgtgctgctgcaacaggcactgctgtggcacgtgccgctgccggcgctgatgctgggcctggcgctgctgctcggcgtcaccggcgaaatcagcccgctgcacgcccggctgttgccggcggcgctggtggccgccattttcgccctcagcacggccggcacggtacccctctggcaggcgccgctgttgtacgtcatcggcaccgtctggtacggcttattcacctggttctggttcaagctgtggaaagaacagccaatgcgcgagacgctcagccagctctacctggagctggcggactatttcgaagccaaatactcgttgctgacccagcacaccgatccgcaaaccgcgctgccgccgctgctggtacgccaacaaaaggtgatggatttgatcagccttttataccaacagctcaatttcctgccgcacgccaacaacctcgaacaaaagcgcctgcagcgcgcctttcaggtggcgatggatctgcaggagcacatcaccgtcagcctgcatctgccggaggaggtgcaaaaactggtggagcagagccaggccgaagcgatcattcgccgcaacgctcaggtgatcgccggccggctgcgcgtggtggcgcacgatattctctaccatcaacattcgaagcgcttctccatgagccacgaactggcggcgctggaaaaaatggcggcgcagcatcccgataacccggtcggccagttttgttattaccacttcagccgcatcgctcgcctgctgcgcacccagcatccgctgtaccgccgcgacctgatgcccggccagcaccgcctgccgttttggccggcgctggccagctacctgtcgttcaaatccaccgccctgcgcaacgccgcgcggctgggggtgacgctggcggtcggcagcagcctgggtgcggttttcaacctgccgaagccttactggatcctgctcaccatcatgctggtgagccaaaacgggtataacgccacccgggtgcgtattcagcaccgtgcgctgggcacgattgccgggctattgctggcggccgggctgttgcagctgcagctgccggaaggagaaacgctgagcatcatgctggtgatcacgctgctggcctacctggtttcgcgcaagaactacgggctgtcggtgattggctttacggtcacggcggtttacaccctgcagctgctggcgctgaacggctcgcattttctggtgccgcgtctgatcgatacgctgataggctgcgtgctggcgttcggcggcaccatttggctgtggccgcagtggcaaagcgggctgctgcgcaagaatgcccatcaggcgctggagaacgatcaagccgcgctgcggcttatgctgaagcagccggaaccggatgccaccgcgttggcctatacccgcatgcaggtcaaccaggcgcacaatgcgctgttcacctcgctcaatcaggcgatgcaggagccggggttcgcgtcgaattatctggcggacatgcggctgtgggtcacgcacagccagttcatcgtcgaacacctgaacgccatgaccattctggcgcgcgagcactacatgctgacgccgaaactggcggaagcctatctgcaaacctgtgaaattgcgctgcaaagctgccagcagcggttggaatacgacggcccgagcagtgacaacagcggcatcatgcagccgccggatctgcatccggacatgcccgtcaccgagatggaacgtcatttgcggcgcattttgtcgcacctgagcgtgatgcataccatttcgtcgctggcctggcgccagcgcccgcaccacggcatctggctcaagcgcaaactgcgcgatcaataagggcgcggcatgccgcgccccgttattcgccgcacgggcttcaggcgttgatcacatcctgcaccgccagctcgaacagcgccatgccggcctcgatgtcctgcagctccaccaccagcgacggcgcgaaacggatcacgttcggcccggcattgaggatcatcagcccacgcgcggcggcggcggtgaggaaatcgcgcgctctgccgtgataatgcggcgtcagttcggcgccgatcagtaaccccatgccgcgaatggcggtgaaaataccgtatttatcgccgatattctgcaaatcctgcacatacagcgcgtggcgctgttcgatgccgctcagcacttccggcgtattgatcacatccaacgccgcctccgccaccgcgcaagccagcgggttgccgccgtaggtggtgccgtgggtgcccacctgcatcaccgacgcaatctcttcggtggtcagcatggcgctcaccgggaaaccgccgcccagcgccttggcggtggtgagaatgtccggcgtcacgccataatgcatataggcgaacagcttgccgctgcgccccatgccgctttgcacttcgtcgaacaccagcagcgcctgatgttggtcgcacagctcgcgcacgcctttgaggaagccggcgtcgaccggcgtaatgccgccctcgccctgaatcggctccatcaccaccgcgcaggtgtggtcgtccatcaccgctttcaccgccgccagatcgttgaacggcacgtgcacgatgtcggccggctttggcccgaacccgtcggagtatttggcctgcccgcccaccgacacggtgaacagcgtgcggccgtggaacgcgttatagaaagcgatgattttggttttataggggctgtggcgggtgatggcgtaatgacgcgccagtttgaacgccgcttcgttggcctctgcgccggagttggcgaagaacacccgatcggcgaaggtggcgtcgatcagtttgctcgccaggcgcagcgccggttcattggtaaagacgttgctggtatgccacagagtctcaccctgacgtttgagcgcctcgaccagcgccggatggcagtgccccagcgccgttaccgcgatgccgccggaaaaatcgatgtactcttttccctgctgatcccagacccggctgccttggccgcgcaccggcacaaactgggcgggtgcataaacaggcaggataacctggtcaaaggtgctgcggctcactgcggattttccagtcattttttcggctccaccctgaaggtttttcagcgctatcgtaatgttagattgaaaacataatcacgaaatatgcataaaaaaccaatcaagcgcaaacgcaaaacgcccgacgagcgaaaaaaacgcatcgggattaacggttgaggaagttatccagcagctgatggccctgctcgctgagcacgctttccggatggaactgcacgccttccaacgccaaagcgcggtggcggatgcccatgatctcgtcgcgcacgccgtcgcgttcgctccaggcggtcacttcaaagcagtccggtagcgtatcggctttcagcaccagcgagtggtaacgtgtcacggtcagcggatcgctcaggccacggaacacgccgacgcccagatggcgaatggccgacgttttgccgtgcatcaccgcgcgggcgcgcaccacctcggcgccgaacgcctgccccagcgcctggtgccccaggcacacgccaaggatcggcagtttgccggcgaaatgacgaatggcggccagcgagatacccgcttcgttcggggtgcaggggccgggggaaatcaccagatgctgcggcgccagccgctcgatatcggccagctgcagctcatcgttgcgcttcaccaccacctcggcgcccaactcgcagaagtactggtaaaggttataggtaaaggagtcgtagttatcgatcagcagcagcatgtcaggtccggcagagaaaaacgccgccatagtttactgatttaacccgccgctgccgacgataatttccgcttactttttacggccgccggtgatcgagcccagcacgccgcgcaggatctggcggccgagatcgcgcgccatgctcttggcggcggtctggacgatgccgtcgcgtttgccgccgcgcgggccggtggaaccgaacaacagctcgttcaaaccatccatcaggccgccgcccgcctgctgttgttgctgttgcgtctgcggttgttgcccctgctgcggggtgccgatggtggcgaaaccgcccgacgacagcttctcgtaggcggactcgcggtcaatcatgtcttcatagcggccatacagcggcgacttgttgatcgcgctgttcagcccttccgcgccaagcatgcccattttggattccggcgcgatgaccatcgcccgctccaccacgttcggccggcccttctcgtcgaggaatgacaccagcgcttcgcccacgcccagctcggtgatcgccgtttcggcatcgaaggccgggttggcgcgcagggtttgcgccgccgtcttcaccgccttctgatcgcgcggggtaaaggcgcgcagcgcatgctgcacgcggttgcccaactggcccagcacgctgtccgggatgtccagcgggttctgggtgacgaagtaaatgccgacgcctttggagcggatcagacgcaccacctgttcaatcttggtcagcagcgccgccggcgcatcgttgaacagcaggtgcgcctcatcgaagaagaacaccagcttcggctgttcagggtcgcccacttccggcaggtgctcaaacagctcggccagcagccacagcaggaacaccgaatacagcttcggctgattgatcagcttgtccgccgccagcagattgatcacgccgtggccgttggcgtcggttttcatcagatcgttgatgtccagcatcggctcgccgaagaactggttggccccctgctcttccagcgtcagcaatccacgctggatggcgccgatagaggcggcagagatattgccgtactgggtttggaattgtttggcgttgtcgccgacgaactgcaccatggcgcgcaggtctttcatgtccagcagcagcagcgcattgtcatcggcgattttgaacaccagctgcagcacgccgctttgcacctcgttcaaatccaacaggcgccccagcagcaacggcccgagatcggaaatggtggcgcggatcgggtggcctttttcaccgtaaatatcccacgggataatggtgcaggcctgcggttgccagtcggtgacgccaatcgccgccaggcgcgcctgcagtttttcggaaggcacgccctcggcgccgatgccggacagatcgcccttcacgtccgagaggaacaccggcacgccgatgcgtgagaactgttcggccattttctgcagcgtcaccgtcttgccggtgccggttgccccggtgatcaagccgtggcggttggccaacgccggcaaaatcaccagatcctgttccggttttccgtctttcatcgctttggcgataatccgtggttcactcattttctgttcctttgacgctgaccgcggcgcgaaacgcgcctgttgatgcaataaagctataagcgccgcgtaaccccgtcaaggacaaacaaaaagggcaccgtcggggcctgatgaattcagattgcgcttagcgtcagagcgtctttgcttgaacaataaagcaccagtgttatagtgagcattacgctgtatatacgaggtaaataccatgtctgaatctaccgtggtaatccgcgtggatgacgagttaaaaaccgctttcgccagcgcggcaaaggccgccgatcgcacggcttcgcaactgctgcgcgatttcatgcgcgagtttgtcagccgccaggcgcagcaggaagagtacgaccagtggttaaaggaaaaggccgaggtgagccgcaaggcgttgcgtgaaggcaagttcgccgacgatgaagaggtggctgcttatttcgccgaacgcagagctaaatcaacgcaataaaacacaaaaggacttttgtgaaactgacatggacggtacccgccatcgccgatcgtctggcgatttatgaatggttggaacttaaaaatccggccgccgccgcagaaaatgatgcaaaaatcgctgacgcggcggcacgcctcgtgcatcatcccaccagcgggaaaacgggtcggatagccggcacgcgcgagctggtcatctccccgtcctatctgttggtctatgaattggcggctcaacgcgtcatcatattggccatcgtgcatactcgccgccggtggccgccggcatagtcacccccgcagccccagttgctccttcagcgccttcaaatagcgccggctgaccggcaccggatcgcctgccgacatgatcatctctgccgcaccgccctcttcgaagcggatctcgcgcacctgctccaggttgaccagatactgccgatggcagcgcaccagcggcgtacggctttccagcgtgcgcagcgtcaattcggtgaaacactccatgccgtcgctgcgcaccacgaataccccgctcagcttggaacggatcgccagcacttcatcgaaccgcagcagatagatgcggctgtggccggtgcagggaatgtatttcaggtagccggcgctctcatccagcgccgtcacgtcttgcggcgcactgcgctgccgcaggcgttgcagcgtcttgctcaaccgcgtcggctccgccggcttcagcagatagtcgaaggcgtgctcctcaaatgcctgcaccgcgtattcgtcgtaggcggtcagaaacacgatgtgcggcatacggttgggatccagcatgccgaccatttccagcccgctgatgcgtggcatctggatatcgagaaacaccacgtccggctgcagccgatggatctggctgatggcttcgatggcgttggcgcactcgccgataatcgagatccccgcttcagcttccagcaggtggcgcaggttgtcgcgcgcggaaggttcatcgtcaacaatcagtgcgtttaacatcaggctgccctctccatagggacattaagcgtaatgcgggtgtaggcgtccggccggcaatccacctgcacgccatagccttcgccgtagcgcacgcgaatgcgtttatccaccaggttcatccccagcccgctgcagttcggtttcggctggaacagcccggcgttgtccgtcacctgcagcagcagatgctcgccttcgcagcaggcgccgatttcgatgcggcctacgcccaacagatgcgaggtgccgtgcttgatggcattctcgacgatcggctgcagcgaaaacgccggcagccgcgccgccagcagcgcctcgggcagcgataccgcaatctccagccgatcggcgaagcgcgctttctctatctgcaggtaggcgttcacatgttcaatttcgtccgccaggctgacttcgtcatccgagcgcttgaggtttttacgaaagaaggtcgagagggactgcaccagatcgcaggcgcgctcgccatcgcgacggatcaccgccaccagggtattcaaggcattgaacaggaaatgcggattgacctgcgcatgcagcagcttgatctccgactgcgccagcagctgcttgtggcgctcgtactgtccggccatgatctgcgccgacagcaggctggcgatgccttcgcccagcgtacggttgatggtgctgaacagctggcttttcggttcatacagcttgatggtgccgatgacccgctggttttcgccgcgcagcgggatcaccagcgtcgatcccagcttgcaggccggattgatcgagcagcagtaagagagctgattgccgtcggcatagaccacctcgttgttgtcgatggcgcggtgcgaatgcaccgaggcgatcggcgtgcccggcaggtggtgatcgtcaccgatgccgataaacgccaacagcttgtcgcgatcggtgatcgccaccgcgccgatgcccagctcctgataaatcacccgggcgaccttcatgctgttttcctgatcgaagccctgccgcaggatgccctcggtgcgctcggcgattttcagcgccttggaagagaaagcgctggtgtatttctcgaacatggcgcgcctgtccagcaggatttgcataaacatcgccgcgccgacggtattggcgatcatcatcggcagcgcgatgtgttccaccagctgcaacgcctcgttataagggcgcgccaccgccagaatgatcgccatctgcagcacttccgccaccagcgccacgccgccgacgaacagcggattgaacagcagctcgatgcgcccccggcgcatggcgatgctgtgtacgatgccgccgaccagcccttcggacaccgtggagatcgcgcaggccacgtcggtcatgccgccgagcgtataccggtgcaggccgccggtcagcccgaccagaaagcccaccgacggcccgcccagcagcccgcccagaaccgcgcctatcgctcgggtgttggcgatcgaatcctgaatatgcagcccgaaataggtgcccatgatgcagaacaccgagaagatcacgtagcacagcagcttgtgcggcaagcgaatggtcacctgcatcagcggaatgaacagcggggttttgctcagcagataggcgataacgagatagacgcacatctgctgcaacagcaacagcacctggttaaattcatacatggcagcaactcatccagagacaacaaagggcgaacgccggatttccggtctggttattgtctgccgattagagcatggggcgcgggagaaaacagtgatgaaggcaaggcttcgggaggaaggacggccgaccccggcgggatcggccaaaaaatttacggcagcaccttggccgacagaatcaccaccggcttggtcggcacattctggtaagggccgacgttgccggtcggcacctgagcgatcttgtccaccacatccatgcctttcaccactttgccgaacaccgcgtagccgaagtcgcgctggccgtgatccaggaaggcgttatccgccacgttcaggaagaactggctggtggcgctgtccttgtcggcggtgcgcgccatcgagatggtgccgcgcaggttgcgcaggccgttgtcggcttcgttcttgatcggcgccttggtggatttttgctgcatgtcagcggtgaaaccgccgccctggatcatgaagcccgggatcacacggtggaaaatggtgttgttgtagtacccgctgttcacgtaatcgacgaagttctgggtggaaaccggtgccttctggctgtcgagcgccaattcgatattccccgccgaggtcgtcagcatgacatgggtctcaccggcggcgagtgcggctggtgccactgcggacagggaacacagcgcgacgaaggtcactaaagtacgtttgaacattaacgggtcctttctctgagagacaaacaacggaaaagcgctttgattctaaagagctgtatcggcaagtgccagccatttacctatatttacccaattacgggacatatcctaggcggccctgaattttgctgcggaaagtatgggcgcagaaggcttttttgccaaccgcatcacgcattttttgccccgtgccgccctggggcggtttttgcgatctgcctcccagtttgcacacgcattgtcgttactctatataaatgagagcgctctcattataaaaaaaacggatattgaagcatcccacggcggcatcgccgcgcaacccctggagaaatgacgtgagtgaattgatgactgaagtcagccccgagtttgaaagcaccatcatggaactgctggtgttctccggcagcgcgcgcagcaatgcgttgatggcgttgcgacaagcgcgcgccggcgacttcgccgccgcggccaaacacatggccgaatccaaagagtgggtgaagaaagcgcacctgatccagaccgagctgatcggcctggacgaaggctgcggcaagctggcgatcaatctgatcaccgtgcatgcgcaggatcatctgatgaacgccatggtgatccaggatctggccgacgacatgatcgagctctatcgccgtcagtcgctgacggagggccgcccatgagcacgctcaaaatcgccgtgatcggcggcggcagcagctacactcccgagctggtcgatgggctgatccagcgcatcgaggagctgccggtcaccgaactggcgctggtggacgtcgagccaggccgccaaaaagtggaaaccatcgccgccctgacgcgccgcatgctggcgcgccatgggctggaacaggtgaaggtcagcgtgcacttcacgctggacgaagcgattcgcggcgccgctttcgtgctgacccagttccgcgtcgggcaactgccggcgcgcgccgccgacgaacggctgggcctcaaataccagctgctcggccaggagaccaccggcgtcggcggcttcgccaaagcgctgcgcaccattccggtgatgctggatatcgcccgccgggtggaaaagctggcgccggacgcctggatcatcaacttcaccaacccggccggtatcgtcaccgaggcggtgtctcgctttaccaaagcgaagatcatcggcctgtgcaacgtgccgatcagcatgcatcacatgatcgccaacatgctgcaggcgccttacgccgacgtgcagctgcggttcgccggtttgaaccacatggtctgggtgcatcaggtcacgcagcaggggcgcgacgtcaccggcaaagtgatcgacatgctgtgcgacggcgcggcgctgaccatgaacaacatcaaggaagagccctggcagccggacttcctgcgcgcgctcggcgcgatcccctgcccgtaccaccgctatttttaccagacccgtgagatgctggcagaagagatggccgccgccggcgagcgcggcacccgcgccgagcaggtgatgcaggtggagaaagagctgttcgagctgtatgccgatccgcaactgaacacaaaaccggaacagctcagcttccgcggcggttctttctattccgaggttgcgctggagctgattcgtgctatccataataatctcggcacgcaattagtggtcaacaccgcaaaccgcggcgcaatccatggcctgccggacgatgctgtgatagaaatcaactgtatcgtcgatgcccaaggcgcgcatccgctgacgttcggcccgctgtcggagccgatgcaggcgctgacgcagcaggtgaaagcctacgaacgcctgaccatcgaggccgcggtgcacggcgatcgccgcagcggcttgctggcgctgatcgccaacccgctggtgggcaacgccaatctggcgcagccgttgctggacgaggtgttgacgataaacgcgccgtatttgccgcagttcaggtaagcgcctgcgcgcggtatgacaggggttcggcgcgccgaacccatttttttagccgtaatcaggagttggacgatggtgacactggaagatgtcgcggcgctggcgggcgtatcgcgcgccaccgtatcgcgggtagtgaacggcgacagcaacgtcaaggcgccgacccgcgagaaggttgaacgcgccgtcgcccagctcggttacacccccaatccggcggcccgcgcgctcgcctccagccacagcaataccctcgggctggtgaccacgtcgtatcgcggcggcttcttcggcgcgctgatggacttcgtgcaaaccgaggccgaatcccacggcaagcagctgctggtgacccagggccgcaacagcgccgaaaacgaatggcaggcggtgcagcggctgttcagcctgcgctgcgacggcgtgatcctgcacgtgcgttttctcagcgacgatcggctgcgccagctggcggcggagcaacgtcatttcgtgttgctcgatcgtctggtgccggggctggaagaccgctgcgtcaccttcgatcatccgctcgccagccgcatggcgacccagcaactgctcgataccgggcaccggcgcatcgcctgcatcagcgggccgcgcgagcgcccgtcgagccgcctgcggttgcaagggtttgaagaggcgatgcaggcggcgaatatcgagccggtggcctgtctggagggcgtttacgatctggaaagcggttaccgctgcgccgatcgcctgctgcagcaagccgcacggcccagcgccatctactgctgcaacgaagagatggcgatcggcgcgctgctggcgatcaacgagcaccgcctgcgggtgccgcaggatatctccttgatctgttacgacagcggcgaacgcgcgccttttgtacgcccggcgttgagcagcgtacattttcccatcagcgagatggcccaatacgcggcgcgcaggctgatcgaccccaccaccccggcgcacccatttgagccgacgatcgtcaaccgtgattccattgtgacggtacgcaaatagatcacaataatgcgtaccctcccttcataggttgcatcaaaaaatcgacaaccatcacaaaaaatcccgttgtctgtgctaggatccgccccctggtggcctgatcgggacttttttctgcgtttgccaggaaaagccagcggccttatgccagcgttaaaacctctaacagacatattcaggcctatacaatgaatgacagtaaccgcatacggcttacctggatcagcttcttttcgtacgcgctgaccggtgctttagtgatcgtcacagggatggtgatgggaaacattgcagagtactttaatctgccggtttccagcatgagtaacacctttactttcctcaacgccggtattttgatttcgatcttcctcaatgcctggctgatggaaatcatcccgctgaagcgtcagctgatcttcggctttgtcctgatggtgctggcggtggcggggctgatgctcggcaagagcctgaccatgttctcgctgtgcatgtttatccttggcgtggttagcggtatcaccatgtcgatcggcaccttcctgatcacccacatgtatgccggccgccagcgcggttcgcgcctgttgttcaccgattccttcttcagcatggccgggatgatcttcccgatcgtcgccgcgatgctgctggctcgccatatcggctggtactgggtttacgcctgcatcggcctgctgtacgtggcgatcttcgtgctgaccctgtgctccgaattcccggtgctgggcaagaaaggcgccgatgccggtcaaccggtcgagaaagaaaaatggggcatcggcgtgctgttcctgtcgatcgccgcgctgtgctacatcctcggccagctgggcttcattcagtgggtgcctgagtacgccaccaagtcgttcaacatggacatcggccaggccggtaaactggtgagcgacttctggacctcttacatggtcggcatgtgggtgttcagcttcatcctgcgcttcttcgatctgcagcgcatcgttaccgtactggccgcgctggctaccggcgcgatgtacctgttcgtcagcaccgacaatccggaacacctgggctactacatcatggctctgggcttcgtttccagcgccatctacaccacgctgatcaccctcggctcgctgcagaccaaggtctcctcgccgaagctggtcaactttatcctgacctgcggcaccatcggcaccatgctgaccttcgtggtcaccggcccgatcgtggcgaaaggcggcgcgcacgcggcgctgaccaccgccaacggcctgtacctggcggtattcgtgatgtgtctgctgctgggcttcgtgaccaagcaccgcagccacggtcacgtgacgcactgatttcttcgcatcaaatacatcaagggcgcccgcaaggcgcccttttcttgcgccttagcgccgaaaatccaccgtctcatcctgctgcaaatgcagcgtggtttccgccggccgcgtttcggcgatcaccgccccctggcgaatcgaataacgcaccggcgtctggcggcgcaccgcgtcgaaaccgctttccgccggcaggatcaccaggttggcgctgttgccggccgccaggccatagtcgctgaggttaagggtgcgcgcactgtggctggtgatcagcttcagcccgtcgtcgatttggccatagcccatcagctggcacacgtgcagccccatatgcagcacctgcagcatgttggcggtgccgagcggataccagggatcgaacacgtcgtcgtggccaaagcagacgttgatctccgcctccagcatctccttcacccgcgtcacgccgcgccgtttcggatagctgtcgaaacgcccctgcaggtgaatgttcaccagcggattggcgacaaagttgatgccggacattttcagcaggcggaacagccgcgaggcgtaagcgccgttgtaagagtgcatcgccgtggtgtggctggcggtgactttcgcccccatctccagcttcagcgccagcgccgccacggtctcgacgaagcgcgattgctcgtcgtcgatctcatcgcagtgcacgtccaccagccgatcgtatttttgcgccagcgcgaacgccttgtgcagcgactccacgccgtattcgcgggtgaattcgaagtgcggaatggcgcccaccacgtcggcccccagccgcagcgcttcttccagcagcgcttcgccgttgggataagagaggatcccctcctgcgggaaggcgacgatctgcagcgttacccagggcgccacctcccgtttcacctccagcatggcgcgcagcgcggtcagcgtgggatcggaaacgtcgacgtgggtgcgcacatactgcacgccgttggcgatctgccacttgagcgtttgccaggcgcgctgcttgacgtcttcatgagtcaacagcgccttgcgttcggcccagcgctcaatgccctcgaacagcgtgccggactggttccaggccggctgaccggcggtttgcgtggtatccaggtgaatatgcggttcgacgaacgccggcagcgccagcccgccctgcgcatccaacacgtcgctgcgccactccagcccttccggttgcggaaccagatgcgcgatgcgcccctgctcgatcgccagttgccacaacccttcatgcccgcttaaacgcaggttatcgataaacttcaatggacgtttcgccacccttcacctctgccgttgcgctggttttcttcatcatactggcagcggatcgcgctgacaaagtcaccgtttcatgcctaccccctgcgtttactccctgcggggtaatttgcatgcaaactgactcgcttcagctaaaggtgaataaaatccgcaacttatcaaaaaacgtgaaaaatcatccatataccacgttagaggtatataagagtgtgattgatttgcatcaataaattgcccctcgggagagataaggtaagcctaggaaacccgaattttgaggcaataatgagcagagtcaaacttgccgtcgtcggcaatggcatggtcggccaccggttcatcgaagatctgttggataaagcagacaaagaccaattcgacatcaccgtattttgcgaagagccgcgcatcgcttacgatcgcgtgcacctttcctcctacttctcgcaccacaccgccgaagagctgtcgctggtgcgcgaaggcttttacgaaaaacacggcgtgaaggtgctgatcggcgagcgcgctatcaccatcaatcgcgacgagaaggtcatccactccaacaccggccgcaccgtctattacgacaagctgatcatggccaccggctcttacccgtggatcccgccgattaaaggctcggatagccaggactgcttcgtttaccgcaccatcgaagacctgaacgccatcgaagcctgcgcgcgccgcagcaagcgcggcgcggtagtcggcggcgggctgctggggctggaagccgccggcgcgctgaaaagcctgggggtggaaacgcacgtgatcgagttcgctccggtgctgatggccgaacagctcgacccgatgggcggtgaccagctgcgccgcaagatcgagcgcatgggcgtcaaggtgcacaccggcaaaaacacccaggagatcgtcaacggcggcggcacggcgcgcaaaaccctgcatttcgccgacggcagcctgctggaggtggatttcatcgtgttctccaccggcatccgcgcccaggacaagctggcgcgccaatgcgggctggagattggccgccgcggcggcatcgccatcaacgacagctgccagacgtcggatccggacgtgtacgccatcggggagtgcgccgcctggcgcgatcgcaccttcggcctggtggcgccgggttacaaaatggcgcaggtggccgccgatcacctgctgggccgcgaaaacggcttccagggcgccgacatgagcgccaagttgaagctgctgggcgtagacgtcggcggcatcggcgatgcccacggccgcaccgagggcgcccgcagctacgtctatctggatgaaagcaaagaagtctacaaacgcctcatcgtcagcgccgacaacaaaaccctgctcggcgcggtgctggtgggcgacaccagcgactacggcaacctgctgcagctggcgctgaacggcatcgaactgccggaaaacccggacggcctgatcctgccggcccatgcgggcagcaaaccggccatcggcgtggattcgctgccggaaagcgcgcagatctgctcctgcttcgacgtcagcaaaggcgacatcatccaggcggtcaacaaaggctgccacaccgtggcggcgctgaaggccgaaaccaaggccggcaccggttgcggcggctgcatcccgctgctcacccaggtactgaacgccgagctgagcaagcaaggcatcgaggtcaaccatcacctgtgcgaacacttcgcctattcgcgccaggagctgttccacctgatccgcgtcgaaggcatcaagtcgttcgaggcgctgctgaccaaatacggcaaaggctacggctgcgaagtctgtaagccaaccgtcggctcgttgctggcttcttgctggaacgagtacatcctcaagccgcagcatacgccgctgcaggataccaacgacaacttcctcggcaatatccagaaagacggcacctactcggtgatcccgcgctccgccggcggcgaaatcaccccggacggcctgctggccatcggccaaatcgccaaggagtacaacctctacaccaaaatgaccggttcgcagcgcatcggcatgttcggcgcgcagaaagacgacctgccggccatctggagcaagctgctcgccgccggctttgaaaccggccacgcatacgccaaggcgctgcgcatggcgaaaacctgcgtcggcagcacctggtgccgctatggcgtcggcgacagcgtcggcttcggcgtcacgctggagcaccgttacaaaggcatccgcaccccgcacaaaatgaagttcggcgtctcgggctgcacccgtgaatgcgctgaagcacagggtaaggacgtcggcatcatcgccaccgagaacggctggaacctgtatgtctgcggcaacggcggcatgaaaccgcgccacgccgatctgctggccgccgatctcgatcgcgagaccctggtgcgttacctagaccgcttcatgatgttctatatccgcaccgccgataagctgcagcgcacctcggtgtggctggagagcctggaaggcggcatcgattacctgcgcaaagtgatcgtcgacgacaagctcggcatcaacgcgcagttggaagccgagatcgcccgcctgcgcgacgcggtggtctgcgaatggaaagagaccgtcgagcacccggaaacgcagctgcgcttcgcccacttcatcaacagcccgctgcgcgatccgaacgtgcaggtggtggccgaacgcgaccagcaccgcccggcgcgcccggacgagcgcattcccgtcaccctgatcgataccgaggagagtcacgcatgagccagtggattaccgtttgtcccgtcgccgacattctgcccggcaccggcgtgtgcgccctgatcggcgatcggcaggtggcggtgttccgcccctatgccgacgaacaggtgttcgccatcagcaatatcgatccgttcgcccaggccagcgtgctgtcgcgcggcctcatcgccgagcatcagggcgaattgtgggtcgccagcccgctgaagaaacagcgtttccgcctgtacgacggtcactgtctggaagatgacagtcgttccgtcgccagcttcaccagccgggtggtcgacggcatcgtgcaagtcgcggcataacctttcgggggcgcatcccgcccccacgccgataaccccgaggaatgccgatggactacctgccgattttctgccaactgcaacacaaagcctgcctgctggtcggcggcggcgaaatcgccgaacgcaaggcgcgcctgctgctggacgccggcgcggcgctgaccgtcaacgccctggccttcagcccgcagttccaccagtgggcggcagaaggcctggtgacgctggccgagggagaattcagcccgagcctgttggcggaaaaatggctggtgatcgccgccactgaccggctggaggtcaacgcgcgggtgtaccaatgcgccaaccagcagcgggtgttctgcaacgtggtcgacgacccgaaacgcgccagctttatcatgccgtcgattatcgaccgttcgccgatcatggtggcggtgtcctccggcggcaaagcgccggtgttggcgcggctgctgcgcgagaagctggaagcgatgctgccgcaacacctcggcaagctggcccaactgggcggctcgctgcggcagcgggtaaaacaacgcttcagcggcctcggcgcacgccgtcgcttctgggaacggttgttcgctcacgatcggctggcgcaatcgctggccaacggcgacgccgcgctggccgaacgccagctcgaacagctgttcagcgaacagccggcagatcgcggtgaagtggtgctggtgggcgccgggccgggcgatgccggtttgctgacgctgaaagggctgcaacagatccagcaggccgacgtggtggtttacgaccggctggtctccgaagagatcatggcgctggtgcgccgcgacgccgagcgcatcttcgtcggcaaacgcgccgggcaccactgcgtgccgcaggaacagatcaaccaaattctgctgcagcaggcgctgcaaggcaaacgcgtggtacggctgaagggcggcgatccctttatcttcggccgcggcggcgaagagctggagacgctggcggacgccaacgtgccgttctcggtggtgccgggcattaccgccgcctccggctgttccgcctacagcggcatcccgctcacccaccgcgaccatgcgcagagcgtccgcctggtgaccggccacgccaaggccgacggtggattggactgggcgacgctggccgccgggcaacagacgctggtgttctatatggggctgtcgcaagcggcggaaatccagcgccggctgatcgcgaacggactgccggccgccacgccggtggcgctggtggaaaacggcacctcttgccgccagcgggtgatcgaaggcgagctccaccaactgggcgccttgtccctgcaggccgccagccccagcctgatcatcgtcggcagcgtggtcagcctgcgcagcaagctcaattggttcgccagcgaggaatcgcccgccagcctggcgcaaatggcgtaataccgacgtaaaaaaagcggccttaggccgctttttttatttgcgccggcgttacgcctgcggcggtacgaaaccgacggcctggtagaccttcgccagggtttcctgcgcgcgtgcacgggccttggcggcgccgtcgcgcatcacctgctgcagataggcttcgtcgttgcggaagcggtggtagcgctcctgcagctcagccagcatgccggagacggcttccgccaccgcgcctttcaggtggccgtacatctggccttcaaactcggcttccaactgcgcaatgctcttgccggtcacgccggcgaggatatccagcaggttggagacgcccgccttgttgaccacgtcgtaacgcacgacaggcggctcttccgagtcggtcattgcgcgtttgatcttcttggtcaccgctttcggatcttccagcaggccgatcacgttgttgcggttgtcgtccgacttggacatcttcttggtcggctcctgcagcgacatcacgcgcgcgccggatttaggaataaacggctccggcactttgaacacgtcgccgtacagcgcgttgaaacgctggcccacgtcgcggctcagctccaggtgctgtttctgatcttcgcccaccggcacctgattggtttgatacagcaggatgtccgccgccatcagcaccggatagctgaacagcccggcgttgatgttctccgcgtagcgtgcggatttgtccttgaactgcgtcatgcggctcagttcgccgaaataggtgtaacagttcagcacccagctcagctgcgtgtgctcaggcacgtgcgactgcacaaagatggtgcttttttccggatcgatgccgcaggccaggtacagcgccagcgtatccagcgtggccttgcgcagcttctcggcgtcctggcgcacggtgatggcatgcagatcgacgatgcagtagatgcagtcgtagtcgtcctgcatctgcacccactgacgcagcgcacccatgtagttgccgatggtcagttcgccggacggctgcgcgccgctaaatacgatgggcttactcatgtttaaatttcctgattctctaaagatgacagcccaagagcgggcaacaaatcggcgaagcgctccaacacccgatcggggtggctcagggcgatcgattcaccgtagttataaccgtaggtaaagccgacgctcgggcaaccggcgccctgagcggcttgaatatcgttgcgtgagtcgccgacgaacagcagttcatgcgcgcgcaggccaagcttgccgagcaccaggtacaacggcgccgggtgcggtttcttttccgtcacgtcgtcgccgccgatcaccagcgagaaatagtcgccaatgcccaacgctgccagcagcggcgccacgaacggcgtcggcttgttggtcaccagcgccatcgggtaaccgtgcgcggccaggcgggccagcgtctcttgcacctgtgggaacagacggctgccgctgtcgacggtctgcgcgtagaaatggtcgaagcgttcacgcagccggctgcactgctccggcgtgccttccgcctccgcccaacgcagcgcgcgctgcaccagcacgtcggcgccgttgccgatccaggtgccaacccgctcctcacccgcttgcggcaggcccgtctcttccagcgccatatcgatggcggccgccagacccggcgcgctgtcgaccagcgtgccgtccagatcgaaggccaatgcgcggatcgcgccgaaatcagccatgggtaaccttcgccagctcgctgcgcatttcgtcaatcaccttgcggtagtccggctggccaaagatggcggaaccggcgacgaacatatcggcgcctgcggcggcgatttcggcgatgttatccactttcaccccgccgtcgacttccaggcggatatcgcgaccgctgtcgtcgatcagtttgcgtacctggcgcagcttgtccagagtgccgtggataaacgactggccgccgaagcccgggttgaccgacatcagcaggatcacgtcaattttatccatcacgtaatcgaggtagcttagcggcgtcgccgggttgaacaccaggccggccttacaaccgtgctctttgatcagctgaatggtgcgatcgacatgttcggaagcttcggggtggaaagagatataagacgcgccggccttggcgaaatctggcacgatgcgatctaccggcttgaccatcagatgcacgtcaatcggcgcggtaatgccgtagttgcgcagcgcttcgcacaccatcggaccgatggtcagattgggcacgtagtggttgtccatgacgtcgaagtgcaccacgtcgccgcctgcggccagcacgttagcggtatcttcacctaaccgggcaaaatctgccgacagaatggacggggcaatcaaaaactttttcatccgcttctccaaacgtagggtcgagttgttatgcgccggggtgcccccggcttagcgatacagcgccaaaagctcgttcactttgctgcggccgagaatattgcggctgatcgtgcggcgcgctttcaccacatacagcgcagcatgctggtaccagtcgcgcgtcagctcggtatcgtgattggagatcaataccggtacctggctctctaccgagagctggtgcgccagatgcgccaaactctgctgatcggcaatgctgaagctgttggtgtggtaagcggtgaaattcgccgtcgccgacagcggcgcgtaaggcggatcgcaatacaccacggcaccggccacggccttcgccatggtatcgcggtaatgctcgcagacaaaagtggcattgcgcgatttttcggcaaaccagtagagctcttcttccgggaagtacggtttcttgtagcggccgaacggcacgttaaactcgccgcgcaggttatagcggcacaggccgttatagcagtgacggttcaggtacaggaacagcagcgcccggcggtaaggctcggtgctagtattgaactcttctcgcagcaggtaaaactgatccgagttattgaattcatcggcgaaaagcgtgcgggcatcgcgcacgaagtcatccgtgcgcagcttaacgatgttatacaggttgataagatcgctattgatgtcggcgagaatgtaggcgtcgtaatccgtattcagaaagacggatcccgcacccacgaagggctcgattaagcagtctcccgccggcagatggcgacgaatctcatctaccagcgggtattttccaccagcccattttaaaaaagcgcggtttttcttcatgccgtcaattagctacttatacaattcagagcggcggattgtactctgtttcagacagcacatcagcgcacaaatttaaatgatttattttttaagatcttgctgcacttggtgtacaggtcggacccacggttttttcgcctgcacatccgccggcaacgaagcaatggcgcgcttcgcttctgcggaagaagcatagttgccgctcaccagtacgtaccacggcttgccgtcacgcttggtggcgtacaccaggtaattctgcagcttctgctgtttggcgtaggcgttcagcgtatcggaacgcgaagcgctgctcagctgcaaggtatagtggctgcccggcgcagactgcacagagctgccgctgctggcgaccgctcccgctttcgcggtggaagacggcctggccggcggcgtatacaccgtggtcggtgatttatgctgcgttgcggtcggtttggcggcggcagttttcgccggcgttttatgctgttgcggcgcggttccctgcacaggacgcgtcgcttcgcgcgctgcggcaccgctcatcaccgtcgccggtgcggtcggcaacgtcgacgctgcgccggtcatgccttgggtcgccgcatccacctgtccctgctgctgcgacaacgcatccgccatgttgcccggcaaatcgacgcgctgctgcgcaccgccctgctgaggctgcgtttgcgcttcggtcggcgtgccggagatcggcggaacgctgacgttctgcggttgctgcggctgagtcgcgctcacgccgttgttatcgtgggtatccgtggtaccgcccggcacgccgttgttggcggtagtcagcgacgaagaaccggacaggttgatatcgcgggctccgccgttttgcgcgccgttctcctgagccgcttcatgtttggtcggcgccttcagggcggaaccgatgccgataatcagcagcagcagcaccaaaatgccgatgccaatcatcaaatgttggcgtgaaacggcgaagcgcggcgcggcggccggcttgcgcgagcgcgtagggcgacgatcgctgctatcaggtctgagatcgtcttccggtttaaactcgtccatctgaaaccctccaactagaggcaaaagcccaccaccgtagacctaccgtggcacgggcagattaacccgatgatggcaaagcgacacccgtcgtgctctgctcactgtattaatatagatgcaaatggcggctaagccactgttacttagtccgatttaattacgcgtctgctcaggcaggcaggcggcgatcgacgccaacaccagctcatgccctacgcctccgcgcacttccgccgcaccgatcgcggtcggcagcaccaggcgcagttcacccgccagcactttcttgtcgcgcagcatgtgcggcagataggattccggcgtcatttcctgcggcccgcagaccggcaagccggcgcgcagcagcagcgttttgatgcgttcgatatcttcaacggagaactggccgagacggtgcgcggtttccgccgccatcaccatgcccgcagccaccgcttcgccgtgcagccatacgccgtagcccatttcggcttcgatggcgtggccgtaagtatggcccagattcagcaaggcgcgcaggccgctttcgcgttcgtcggcggccaccacctcggccttgagctcacagcagcggcggatacagtaggctaacgcctgcatatccagcgccatcagcgcatcgatgttgttttccaaccagacgaagaactcgcgatcgaggatgatcccgtatttgatgacttctgccaggccggaagagagttcacgcgccggcaaggttttcaggcaatccagatcaaccaccaccgcagcgggttgatagaaagcgccgatcatgtttttgccgagcgggtggttgacggcggtcttgccgcccacggaagagtccacctgcgacaacagcgtggtgggaacctgaataaagcgcacgccgcgttggtagcacgcggcggcaaagccggtcagatcgccgacaacgccgccgccgagggcgatcagcgtggtatcgcgcccgtgcggtttttccagcagcgccgaaaacacctgctccaacaccgccagagatttgtactgctcaccatcgggaaggatcacctgatccaccacgacgccgccctgctccaacacctgccggacacgctcaagataaagcggcgccagggtctggttggtgaccaacatcgcttgctcacccgccttcaacggcataaaagaagccggatcgttaaacaatccggcggcgatggtaatcgggtagctgcgctccccaagcgttacagtaattctctccatgtcgcgctcagttctctgtatggtgcggcggtggttgatccccgctgcggcggggaacacaaatcagttttccgcattggccgacggcgaacgcggaaagcggcaatcagttgctttccagcatgttgatgatctggttggcaaccactttagcgctctgatcgtcggtgcggatggtgacatcggcaatctcttcatacaacggattgcgctctttcgccaaggcttccagcacttcacgcggcggagaatcgacctgcagcagcgggcgttttttatcacgctgggtacgagcaagctgcttctcgatcgtggtttccagatagaccaccacaccgcgcgcggacagacggttgcgcgtttcgcgcgacttcaccgaaccgccgccggtcgccaacacaatcccttgtttttccgtcagttcattaatgactttttcttcacgatcgcggaaaccttcttccccttccacgtcgaatacccagcccacgtcagctccggtacgtcgctcaatttcttgatcggagtcgaagaactccatattgagttgctgagctaactgacggccaatagtgcttttgccggcacccataggcccaaccagaaagatattgcgtttctctgccatgtttttcggtattactaagacaattcgttaatgttaacccgccccgccaatcaaatcagcggcgggacctaaactgaaacctcatgagcgatagtgcgagatcagacgaaaaattatctcaacactcttggtagtttggcaaccgaataaatcgcaatccacgccgcgggagggaaaccatatgtttttaacggcgtcttgacgctaacaaaaaacctcggtgctcaattcggtaacccttgtaagctaaatcggccgcagcgtcaaacgcagatccccccaaggagataaaaaagtgtatctgctcatcaactttaggagatttgccgcccggccgacaggccgccgcttatcccttaatcagagtcggcgtaatgaagatcaccagctcgcgtttttgctgttgtgcgccgctttgtcggaacaagcctcccaataacggcacatcccccaaccccggcaccttgtccgccgtcttgccgctatgccgttgaaaaataccgccgagcaccagggtttcaccgtttttcaccgtgatctgcgtcttaatctcctgtttatcgatggtcagtgcctcacccgccccgcggctgatagcgcgccccggcatattttggctgatgtgcagcgtcagcgtgatgcgcccgtccggcaacactttcggtgtcacctccatgcccagcaccgcctctttgaactcgatggcagtcgcaccgctggcgccgcttgacacttcgtaagggatctcggttccctgcttgatactggcggtttgcaggtgcgccgtcagcaggcgtggactggcgatgatctccacctgattctcctgctccagcgccgtcagctccaggctcagcaagcgcccgctgatgcgcgccagatggaaaccggcgttcaccgcgctgcgctccagcggcaggttgacaccgacattgcccggccgcaacggccgcgccggcctgtcgtcgggcgccaacccccaacgcacgccaagctcacgcaggctttcgcggttgatggtcacgatatgcgccgccagttgcacctgcgccagcggcgcgtccatttccgttacccgctttttcaactgcgtcaggattggcgcggtgtcgcgcagcagcagcgtattggtgcgtttatccgccaacacgctgccacgctcgctcagcaacgcgccacgttgggcgttgaggctttcggcaatttccgccgcatcgccgttctgtaacgtcaaggtcaggctgtgcagcggttgccgctgcgccaacgcctctcgctgctgccttttttcctgtgcgtccggctccggcgagatcagtatcacgttgccttcccgcgtcatcgccagtttgcccatgcgcagggtcaacgccagcgcctgcggccagggcacattctccagccgcagcgtcaggttgccgctcacgccgggcgcggcgatcaggttcatctgccgataatccgccaacgcctgcaggatgaccgtgaccggcgcatcctgaaattccagggaaacccgctgtttatcctgcgcctgcgcggtgccgagcgccaggcaccacagcgccaagcccaatccagcacatcctttcatggtttgccatccttgttgtccatcatgagcgagacgtcgccctggctcgccgggcaatctggttcggccgtcagcgccgttaacgtcaggctacgcgcctgcacctgcgtcaccagccagcgctcggccagcacccgttgctgcggccgcaggcgcaaccattgccccgccggcgtcaccacccagccatagcgcagcgtcggttgcccgatgacgcctttcagtcgccagcccgccggcgacgcctccgtttgggcacaagcaggcatcggcagcggcgcaaacgggtcgcgcggctcagcgcacaatgcccatggccatagcaaccaccaccaacggccgagccttttactcattgggttgatcctcggtggcatcctgcaaaaccaaccgcgccgtcatgccaagggacggcgtctccacgctcagctgctcaaggcgtaaatcggtgggcagcgtctccagcagcgccagcaaaccggcgtagtcaatgcgcaagctcagcgtttgccgcggcggtttttcctgccgctgccagcgcaacaacgcgcctcccgcccgttgcagcacgctcgccagatcgccggtggtggacggaggtagcggcgccgccgggatagcggtttccggcacctcgtccagttggcgttgcaccatggcgatctgttgcagcaggcgctgttgccgctccgccgcgctttcccgctgacgccattcgtcttgcagcatccagccgccgcccaacagcgccaacgtgccgatacccaacccttgcgacagcagtaatagccagcccggcaagctcagccagaggcgcagcccggaggacaaacggttatccatcacgcccccactgcgccgccagatgaaaggtgtacaggccgtcgtcgcgttgcgccacctcagccaaacgcaaccgcggcaacgcaggcatccccgccagccgccgttcgaactgcgtgatggccgcaggagagcggctcaatccgcgcagccgcaggccgttcaccgcatcactctccatcgccgtgagccacagcggtggaggaatgctggaggacaattgctgcagcagctgaaaataacgccggttatgttgggcattgctcgcctgccgttcggcgcgggcgcgctgcagcgcccgctgcgcccgctcttgctgttgctgacgggcgagcaacgtcagtgccgccagctcttcacccagcatcgccagccgcgcctgccgctgcgcctgttggtgacgcaactggccggcgaccaggaacagcgtcagcagcagtgccgttagctgcaacagcagcacgcccaaccagaaatagccgcgtcgccgctcgcggcgttgtcgccagggcagaaagttgacctgatacatcagcgatcctcctcgcgcagcgccaggccaccggccaacgcgaacgccgaaggatgcgcaggcaacggcggacgcagctgcgtgaaagcgctgagcggcgaccaggcaaggcaaccggcgggcaaggcacctgccagcacgctgccagcatagatcggccgatcgtcgcccgccggcatctgggcttgcagcacccgcagcgcctgcgcgtcatcgtcgcccggcgccagaccaaaggcgaacgcgccgtcggccggcgccacccacagccattctcgttcgagacggtgcatcagccccgcagcgggcggcacgcctgccgccgtcgccatcatccgcagcgcgcagggggtgatatcgaccgcttgcggatgcaggccagcctgacgcagacaatgcagccactgctgcagctcctgccgccgcgcggcggtcagcaacagcgccgcctcatccgccggcgcggtgcgatagtcgagcgccagcgtctggccgtcgagcggaaactgcttcacaccgtggccgccgatatagtcgctgcgttccggctcgcgcagccgcgcgtccggctgcgccatgcgttgctgcaacacgcgctgcgccggcagggcaatgcgtaaggaaatatgtcgcggcagttggacgcgccattgccgcagcgcccggataagaaattcggaaggttccagacagccatcgcgtaaaaccgcctgcggcagcgcctgctgccaccagtggcgcaactgccagccgttgcggcgccgttgggccgccaccgcccgcacgcagtcgatttgtatatccagccccacctgccatgcttgagggaacatgtttcgcaagcctccataacatcagatgataaaagaacatatccatgtcgcaggcttgcctttatactaccgcgcggttgtttataaactgcccaaatgacttagaaatgggaaatctcaggtgaagttcgtaaagtatttactaatccttgcagtatgttgcatcgtgctgggagcagcctcgattttcggcttgtacaaatatgtcgagccgcagctgcccgacgtcgcaacgctgaaagatgtgcggctgcagataccgatgcaggtctacagcgccgatggcgaactgatcgcccaatacggcgagaaacgccgcattccgctgaaactggatcaaattccgccggtgatggtgcacgcattcatcgccaccgaagacagccgcttctatgatcaccatggcgtcgatccggtcggcatcttccgcgccgcctccatcgcgttggtctccggccacgcttcgcagggggccagtaccattacccaacagctggcgcgtaacttcttcttaagcccggaacgcaccctgatgcgtaaaatcaaggaagccttcctggcggtgcgcatcgagcagatgctcaccaaggatgaaatccttgagctgtatctgaacaagatctatctgggttaccgcgcctacggcgtgggcgccgccgcgcaggtctatttcggcaaagacgtcagccagctgaccctgagcgaaatggcgaccatcgccggcctgccgaaagcgccatccaccttcaacccgctctattcgcacgatcgcgccgttgcccgtcgcaacgtggtgctgtcgcgcatgctggacgaacactacatcacgcaggcgcagtacgatcaggcgcgctccgaagacctggtcgccaactaccatgcgccggaaatcagcttctccgccccgtatctctccgagatggtgcgtcaggagatgatcaagcgctacggtgaaaacgcctataccgacggttataaggtttacaccaccgtgaccaagcggctgcagctggcggcgcaggaatcggtgcgcaataacgtgttggcctatgacatgcgccacggctatcgcggcccgtcaaacgtgctgtggaaagtcggcgaagcggcctgggatcgcaaacagattgtcgactcgctgaaaaacctgccgaactacggcccgctggcgccggcggtgatcaccgccgccaacccgcaggaagcgacggcgatgctggccgacggcagcagcattgccctgccgatggcgaccatgcgctgggcgcgcccataccgttcggacactcagcagggcccaacgccgaaacgcgtcaccgacgtagtgcaggccggccagcaagtgtgggtgcgtaaagtgaacgaagcctggtggctgtcgcaggtgccggacgtcaactcggcgctggtctctatcaacccgaacgacggcgcggtgaaagcgctggttggcggcttcgatttcaaccagagcaagttcaaccgcgtcacgcaggccctgcgtcaggtgggctcgaacatcaaaccgttcctgtacaccgccgcgatggataaaggcctgacgctggccaccattctgaatgacttgccgattacccgttgggatgccggcgccggcaccgactggcggccgaagaactcgccgccgacctacgacggcccgattcgcctgcgacaggggttggggcaatcgaagaacgtggtgatggtgcgcgcgatgcgcgcgatgggcgtcgattacgcggcggaatatctgcagcgcttcggcttcccggcgcagaatatcgtgcataccgaatcgctggcgctgggctccgcctccttcaccccgatgcagctggtgcgcggctacgcggtgctggcgaacggcggttacctggtcgatccgtacttcatcaccaaaattgaagacgataacggcaatacggtgttcgaagccaaaccgaaagtggtgtgcggcagctgtaacctgccggtgatctacggcgatacccaccgttcggcggtgctgtccgacgacaacatcgaaaacgtcgccacctcgcaggaaggcaacaacagcacggtgccgatgccgcagctggagcaagtcaccccggctcaggtgcagcaggacggcgaccaacagtatgcgccgcacgtgatcagcacgccgctggccttcctgatccacgacgcgctgaacagcaatatcttcggtgaaccgggttggatgggcaccgcctggcgcgccggccgcgatctgaagcgtcatgatatcggcggcaaaaccggtaccaccaacagttccaaggacgcctggttctccggctatggcccggataccgtgacctcggtgtggatcggtttcgacgatcaccgccgcgacctgggccgttcgacggtatccggcgctatcccggatcagatttccggcggtgaaggcggtgccaagagcgcccagccggcgtgggacgactttatgaaaaccgcgctggaaggcatcccagagcagaaagtcacgccgccgccgggcatcatcagcgtcaccatcgacaagagcagcggcaagctctctggcggtggcggcggcagccgttccgagtactttatcgaaggaacgcagccgacggactacccatcgcgcgataccggcaccacgctgaccgatccgggcggcgaaagtcacgagctgttctgatcgaaaagggccagagaaatctggccctttttttattcggcgtgaagcgtatcagcgcgacgcgcgcaaaaatgcctcggaaaggaacagcgcgctgacgttgcgcgcctcacggaaatccggttccgccagcagcgccatcatgttggcgatcggccagcgcacctgcggcaagggctccggctcatccccttccaggctctgcggatagagatcgtgcgccagcacaatattcattttgctggaaaagtaggacggcgccatcgtcagcttactgagaaaatcaaagcgtttcgcgccgtaccccacctcttccatcagctcgcggttggccgcctccagcactccttcaccgggatcgatcaaccctttcgggaaccccagctcataggattcggtgccgaccgcatattcgcggatcagcagcaggtcatcgccaatcaccggcacgatcatcaccgcttcgcgatccgaaggccgcatgcgctcatacacccgccgaacaccgttgctgaattccaaatcgaccgactcgacgttaaacaaacgcgaacgcgcgaccgtttccactttcagaattttaggtttttgcaggtgtttatccatgattgcctcaaagaggttacccaggcgcggacggggcaaccgaaaaaatgattggcgtaacgcacggctcgttggcgctcaaacgctgaccaaattcgatcctgatcacattgtgcgttaagggcaagctccgccgcaacgcgcatgaacagtaatttactttcttttaacaagcgtagccagcggccggcgattttccgtactgattcagcaaacagcgcgcaagaaaataggataataccgatatcgacgacagaggccggttgctagtatcacgcaggcaagaatcagtgataaaatggccttgcgtcatgaaggaatgagatccagagcgagaatctgtttgttccctcattagttctgggtgcctcctggcggtttactccgtataatattcagcttttcatcaggttggcgaaattcacgggtgtgagatggggattgcatgagcacaatagtgttgatattggccttagtgcttgtctgcctgattgccgccggcctgtacctgtggttcaaggcccgcaacccgtcggcgctggcgcacgcattgccgtttatcaagcctgcccaccgcaagctgaccgacgaagagcgcgccgcggtcgagttctatctcagtcagcaaaacaaactgagcaacaaactgttgcccggcggcggcgctacgctgcccgcggccaagctggcgctcaccccgcaaagcgataacgtatatccggtcacgcacgccatcacccgctacgggctggccagcgacgatcccaataaatggcgctattacctcgacgcggaagaggtgcatctgccgccgttttgggaaccctatatcaccgccgacaaccatgtggaagtgatcagaacccagacgctgccgctggtgatttcgctcaacgggcactcgctgaaagatcacattcacgaccggccgcagccgccggtggtggccgccacgccgaccaaaaacgcgtccatccgcaaggaagagagcgagcatgtcgagctggtcaatattcgcaaggaaacgccggaagagcatgcgctgaaccggccgaacggcatccgcgaagccgtcatcatctccgccgcactgctgctgctgttcttcagcctgataagcccggtgctggttatcccctggatgatttttgtggcggtgctgatgatcgcctggggatgctggaacctgttccgccgtccggcgtcgcgtgagctgaaagagatccactgcctgcgcggcacgccgaagcgctggggcctgttcggcgagtccgatcaggggcagatcagcaacatttcgctcggcatcatcgatcttatctacccaccgcattggcagccgtacctgactcaggatctgggcaagaccaccgatgtggacgtctacctcaatcggcaggtagtgcgccaggggcgcttcctctcgctgcatgacgaagtgaagaatttcccgctgcagcagtggggccgcaacgcggtgctggtcgccagctcggcgctggtactgctgttgctgttgatctatatcccgctcaacctgccgctgaccctcagcatggcctggctgcagggtgcgcaaaaagtggaagtgaccagcgtgcaggccctggaagccacgccgctgcgcatcggcgacacgctgaaagtgcgcggcagcggcatgtgctatgtgccgccgccggccaacggtggcggcaccgtcaattttgcgccgttcgactgctccggcatctattggaacaacgccgccccgctgccgcagccggaatcggaagtcatagacaaagcgacggccctgctggccacggtcaacagccagctgcatccgagcggcgccgatcagaaggtcaacccgcagctagccagcgccatcgagaaatccggcatgatcctgttggatgacttctctgatatcgttttgaaaacccaggatttatgtcaggcagaaaacgactgcgtgcggttaaaaaacgccttggtcaacctgggcaacgccaaaaactggagcggcctgatgaaacgcgccagatccggcgcgctgcaaggcgtcaacgttctgctgcgcccggtgagcgccgagtcgctggaaagcctgaccaaagtggccacgtcatcgttcatcttcaatgaaacgcgcctggccgccgcggcgctcaacagcccgccaccgggcggtttcctgatccgcagcgacgaaggccgccaactggtcagccacccgcaatcctcggtgccgcaaagcgaatacaacgccctcgaccagtggaatgaactgcagcgcctttccactctgctgttgcataccccgttccaggcccagggggtgatcaccagcctcagcgtcgatgccaacggcacccgccacgtggcgctgcacagcgaaccggacatgatcaccctgtggcgctacctcggcaccagcctgctgttgctggcggtggtcgtcagcctgggctataacgcctggcggctggtgcagcgtcggcgcataaatcaacaccgcgtcgccgatatccagcgttactacgacagctgcttcaacccgcagctcaatccgatgtcgatgcggccgatgccctgaacctgacgccggggcctccgccctgtcatctgcttatgctacgctaacgctattattctcatctgcggaccgcccgtcggttcgcccgtggagtttttatggttcccgagtttgattggccgcagatcgataccgtgctgctggatatggacggcaccttgctggatctggaattcgacagtcacttttggctcagcctggtgccgcaagcgctgagcgaaaggcgcgccattccgtttgatgaagcccgcaatattattgagcgggaatatcaggcggtgcagcacaccatgaattggtattgcttcgattactggagcgagcggttggatctggatatctaccgcatgaccagcgaagtgggcagccgcgcccggctgcgcgaggacaccgagccatttttacgggcgctgcgcggcgccggcctgcaaaccattttgctgaccaacgcccatccgcacagcctggcggtgaaaatcgagcataccggtctggatcggcaccttgatttattgttttccacccacacatttggttatccgaaagaagatcagcgtctgtggcaggcggtgcaacagcacaccgggttcaacccgcagcgcacgctgttcgtcgacgacggcgagccgatcctcgacgcggcgcgcactttcggcattcgttactgcctgggcgtgcaaaacccggactccagcacggcggagaaaagcttccagcgccatccgtcgatgcgcgactatcgcctgctgataccggcgctggccaagggggaagcatgaaggaaaaagcgacgcgcgacgacgcggtccggctggataagtggctgtgggccgcacgcttctacaagacccgcgcgctggcgcgcgaaatgatcgacggcggcaaggtgcattacaacggccagcgtggcaagccgagcaagattgtcgaacttaacgccgagctcaagctgcggcagggcaacgaagaacgtacggtgatcgtgctggcgctgaccagccaacgccgcggcgccggcgaggcgcagcaaatgtatcaggaaaccgaagccagcatcgccaaccgcgaaaaaatggcgctggcgcgcaagatgaacgcgttgaccatgccgcatccggaccgtcgtccggacaaaaaggagcggcgcgacctgatgaaatttaaatttggtgagccggaataacccctcaccgcaatgagagaagattatgtccaaccatgaccaattgcaccgttacctgtttgaaaactacgcggtgcgcggcgagctggttaccgtcagcgaaacctatcagcagatcctgaataaccacgactacccggcgccggtgcaaaaactgctgggcgagctgctggtcgccaccagtctgctgaccgcgaccctgaagttcgacggcgacatcaccgttcagctgcaaggcgacggcccgctgaagctggcggtgatcaacggcaacaaccgccaggagatgcgcggcgttgcgcgcacccaggcgcctatcgccgacgacagcaccttgcatcagatgatcggcaacggcgtcatggtcatcaccatttccccgacggaaggcgagcgctatcagggcgtcgtcggcctggaaggtgaaaccctggccgaatgcctggaagcctacttccgccagtccgaacagctgccaacccgcctgttcatccgcaccggcgaagcggaaggcaacgccgcggcggccggtatgctgctgcaggtgctgccggcgcaggacggcaacctcgatgatttcgatcatctggtgcaactgaccaacacggtcaaaagcgaagagctgttcggcctgccggccaacgaagtgttgtaccgcctgtaccatcaggaagaggtcaccttgtacgaaccacaggacgtgcagttccgctgcacctgttctcgccagcgttgcgccgacgcgctgctgaccctgccgaccgacgaagtggcggacatgctggagcaggacggcaatatcgacatgcactgcgactactgtggcagccactatgtctttgacccggttgatgttgccgcgctgtatgcgggtaacaccggcgaaagcgaccagttgcactaagttacaccctttcggcgggcgcgcccggcgcccgccaacgcccgccgtttgcacgtttgcttttttccgtgtgctatctctcagatcgtaacgaaataccgcctaaaacgttaaatatttgatacccatcgcggttacgcaccgttagatccctacaattgccgccagaaattctgtgaccaaggagtagtaacatgcgcgttaaaggtataacccctcaggatctggccgcttacggcattcacgacgttagcgaaatcgttcacaacccgagctatgaactgctgtttaaggaagaaacagacccatctctggaaggttttgagcgtggggtagtcaccaagctgggtgccgtctccgtcgataccggcatcttcaccggccgttcgccgaaagacaaatacatcgtccgcgacgacatcacccgcgataccgtgtggtgggccgatcagggcaaaggcaagaacgacaacaaacccctcagcccggaagtgtgggccgatctgaaacacctggtcaccgagcaactgtccggcaagcgcctgttcgtggtggataccttctgcggcgccaacgccgactcgcgcctgaaagtgcgcttcatcaccgaggtggcctggcaggcgcacttcgtgaaaaacatgtttatccgcccgagcgacgaagagctggctgacttcgaaccggacttcgtggtgatgaacggcgccaaatgcaccaacccgaactggcagcagcaaggcctgaactcggagaacttcgtcgccttcaacctgaccgagcgcatgcagctgatcggcggcacctggtacggcggcgaaatgaagaaaggcatgttctcgatgatgaactacctgctgccgctgaaaggcatcgcctcgatgcactgctcggccaacgtgggcgagaaaggcgacgtggcggtgttcttcggcctgtccggcaccggcaagaccaccctctccaccgatcccaagcgtcagctgatcggcgatgacgagcacggctgggacgacgacggcgtgttcaacttcgaaggcggctgctacgccaagaccatcaagctgtctgaagaagccgagccggacatctaccacgccatcaaacgcgatgcgctgctggaaaacgtcaccgtgctggccgacggcagcatcgacttcaatgacggttcgaaaaccgaaaacacccgcgtttcttacccgatctatcatatccagaacatcgtcaagccggtgtccaaggcgggtcacgccaccaaggtgatcttcctgaccgccgacgctttcggcgtgctgccgccggtatcgcgtctgaccgccaaccagactcagtaccacttcctgtccggcttcaccgccaaactggccggcaccgagcgcggcgtaaccgaaccgacgccaaccttctccgcctgcttcggtgccgcgttcctgtcgctgcacccgacgcagtacgccgaagtgctggtgaaacgcatgcaggccgccggtgcccaggcttacctggtcaacaccggctggaacggcaccggcaaacgcatctcgatcaaagatacgcgcggcatcatcgacgccatcctgagcggtgagatcgacaaggcggaaaccgtcactctgccgatcttcgatctggcgatgccgaccgcgctgccgggcgtgaatccggagatcctcgatccgcgcaatacctacgccagcctcgagcagtggcaggaaaaagcgcaggatctggccgagcgcttcatcaccaacttcgacaaatacaccgacacgcctgcaggcgccgcgctggtcagcgctggcccgaagctgtaattcggtagcattacctcttcagctaaggcgcggatcccgcgcctttttttattttttcgtgattgctttttgaccagtgagacgagaaaataagtcaatgcaatcattgatagcaaaggaggtttaaatggcgactatcaccgtcagaaatctggacgacgaaatcaaagaactgctgcgtatttcagcggcgaaaaacggccactccatggaagaggaagcgcgcatgatcctgaagcaggcgctggtgaaaaagccgccgcgctatgggttaggaacacgcatgcatcagtacttcgccgaattcggcggcgttgagttggagatccccccacgtgatgaggcccctcatcgtatcgtcaactttgatgaagatgatgaaaaatgattgtgctggataccaacgtcgtttcggaattgctgcggccggcgcctcactacaatgtattgcgctggttagatgagcaggatacgtatcggttctatttgagcgccatcgtggttgcggagttgtatacgggcatcgcctgcatgcctcacggcaagaaacagctcgaactgcaaactaacctcggcgacatgctgcaggaagagttttcagacagaatcttaccctttgacgtcggctgtgcgatgcagcatgcggaattaatgggcgccaatcgccgccgaggcattggcgtcagcatgccggatacccaaatcgccgccacctgcctgcattacggcgccgccctggccacccgcaataccaaagacttcctccactgcggcatcgagttaatcgatccgtggcaggcgccgaccggccgtcggttgcatgaagatgcggcggaatactacgtgatgagcagaaagtcctgacggggccgcagcggcgcggcccacaccagaggtcaggcgttttccctggccgtttgatggccgttggtcgactcttttttctccatcggcaacggaatatacgcgcggatcaacagcccgccgcgctcgctggtgccgatatccagttcgccgtcatgcgcgtcgataatgcgctgcacgatcgccagccccagaccggtgccgctggtgctgcgcgcgctgtcaccgcgtacgaacggctgcaacaggtgcttcaactcttccggtttgatgcccggaccgtcatcttccacctggaaccaaccgcgctgcagctcacggccgctgctgaccttgatccagccgttgccgtaacgcgccgcgttcaccaccatattcaccgccgcccgcttaatcgacagcggatgcacattcatcatcagctcgcccggcgacagcgcggtttcaatcacccgctcatagccgctctcggccgcgaccacttcgcctaaaatggcgttcagatcgctgctttcggtcggcatttcctgcccggtgcgcagataatcgatgaactgctcgatgatggcgttgcactcttcgatgtctttattgatcgactcggccagatagccgtcttcggcgctcatcatctccgtcgccagccggatgcgcgtcaacggcgtgcgcaggtcgtggctgaccccggccatcagcaacgtgcggtcatccgccagctgcttgacgcccgacgccatctgattgaatgcgcgagtcaccgaccgcacttcggaagcgccatactcgcgcagcggcggcggaataatgcccttgcccacctgcagcgccgcatgttccagctccaccagcgggcggttttgaatacgaataaacagccaggcgccgccgatcgccagcagcatgatcgccagcgtatagcggaacagcggtgagaagtcgccctggtggatttccgtcagcggcacgcgcacccagatatcgggctgcagccaggttttcagccacaccaccggggagttcttgttcacctccacccgcacatcggttggcccgccgagctgctgcgccatctgctggctgaggaactggtagtgctgcgcccagcgcaggccgctctcctccgccgccgagttggtgtagagagagatgcccagttcacggtagatctcacggcggaacgccggcggcacttccagcaacgtgccatcttccagctgcagccgatcggtcatcagcatacgcacttcgtaggccaatactttgttgaactgctgcaggctgggcaggatggcgaagttcagcaccaccagataggtcgtcaccaggctgacgaacagcaaggtgacgatcaacaacagggttcgggcaaacgagctacgcggtgaaaagcgcaatcgcctcatgccttgctgccgtccggtacgaagacatagccgagaccccacacggtctggatataacgcggatgcgccggatcttcttcaaccatgcggcgcaggcgagagatctgcacgtcgatggaacgctccatggcgctgtattcgcggccacgcgccaggttcatcagcttatcgcgcgacagcggttcacgcgggtggctgaccagcgccttcagtaccgcgaactcgccgctggtcaacggcatcggctcgtcttcgcggaacatctcacgggtgccgaggttcagtttgaatttgccgaacgcgatcaccgcctcttcctgcgaaggcgcgcccggcagttcgttcgcctgacggcgcagcaccgcgcggatacgagccaacagctcacgcgggttgaacggtttaggaatgtagtcgtcggcgccgatttccagccccacgatgcgatcgacctcttcgcctttggcggtgaccataatgattggcatcgggttgctctggctgcgcaggcggcggcagatggacaggccgtcttcacccggcaacatcagatcgagcaccatcaaatggaaggattcacgagtcagcaagcgatccatttgctcagcgttggcaacgctgcgaacctggaagccctgctcggttaaataacgttctaaaagcgcgcgcaggcgcatgtcatcatcgacaaccaggatcttatgattctcttgcatggtattactcccaaaggctttattgcctgactcgaatattgttagaaaaccttgccatttgagacagcgtttaatggtatgtattctagacgaaattgttacaaagcttattcttttccccatttatcaacaattttcagtgaatgtcgacgggggttcgttaaaatttcgccctttatcggcgcaatgtggggtgacggcccaattttgcacaatttcgccaccggcgaaccgaccggtggcgttcagctgtcgggtcaggaagtctgcaggaaacgcgccagctgccggcgcaactgccggttctcttgctgtagggcgtcaacccggtcgagcagcgttagcgccatggcgatccccggccaatccagatccagctcggcccgcagcctgcgcgcgcgctgcaggtggctcagcgccggataatcgaactcccagcgcggctgcgccggctccagcggcacgataacgcccaggccgacgatctcgaccaattcatcctctgaaatctccaccctctgacacaattccaccacggtgaaagtgatctcttttttcatcatgtgctttactcccattccgcgcgcgggttgaacgccgcctgttcagccagttcccgccacagggcgctggccttctcgttcggcttcggcggcatcaccaccttgagaatgacatacagatcgccgggctctttcttgcccgccagccctttgcccttgacccgcagccgtttgccgctctggctgccggccggcacggtcagcgcgattttgccggtcagcgtcggcacctcaatgctggcgccgagcgccgcttcccacggagcgagcggcgccacgatgctcaggttgtggccgtcgatctcgaacagcggatgcggcgcaaggcggatgaccagatacaggtcgccgttctggccgccgcccacgccggcaacgccctgccccttgaggcgaatgcgctcgccgtcgcccacgccggccggaattttcacgttcagcgtcttgctggcttcgcttacctgccgccccagttcgtcgtacaccggcagcgtgtaggaaatctcgcggctttgaccatgcagcgtttcctcgaggaacagcggcacctccatctccagatcctggccgcggaagccatgcccgccgtgcgagtgcgaagcagagcgatgcccgcccgccgcccgcccgccgaacatgctttcgaagaaatcggagaagtcttgcgcgtcggcgccgccgccgtgccatgaagcgctctgctgatagccgccgcgatcgccgcgcgcctggcggccaaagttcggatcgttgcggtgcagccggatctgatcgtactcggcgcggcgctcctcgtccttcagcacctcataggcttcggccacttccttgaacttgctttcggcatcgtcttcagtgctcacgtcagggtgatatttacgcgccagccgacggtaggccgttttgatggttttcagatcggcgttgggctcaacgcccatcgtggcgtagtaatctttaaattccatgcggtaataccttcaatgtgttgggttgtgcgccaaaattccttgtctctctcgccagatatcctcctttcgtcacattccttttccgctacgctaagcatactcccgatcgttaaaagctgcgcaaactgaataaaaaccgtgcgacaaggcacaggcccgcgcgccatttctaaagccccccgcattcacgtacactgtggcggtggccccataaagataaatcacgatgagaactcaactgataacccgtgaagggtatgacaagctcaaacaagagctggattacctctggcgcgaagaacgccccgaggtgaccaagaaagtgacctgggccgccagcctgggcgacagaagcgaaaacgccgactaccaatacaacaagaagcggctgcgcgagatcgatcgccgcgtccgctatctgaccaaatgcctggagcagttgaagatcgtcgattattcaccgcagcaggaaggcaaagtgttcttcggcgcctgggtagaggtggagaacgaagacggcgaaaccaaacgctttcgcatcgtcggttacgacgagattttcggccgcaaggattacatctccatcgatgcgccgatggcgcgcgccctgctgaaaaaagaggtcggggacgtcgccaccgtcaataccccgctgggcgaggcgcagtggtacgtgaacgagataaactacccgaagtaagctttcagctttttcctaaccgccgccaacgccgccgtctgcgctgttctccatgccgcggccgcgcggcggcggcccgcttcgctggcattttccccgatcaatccgtataactgtcccctgtttattcaccgatctcaatacagataccagacctatgaatgacccactgagccgcattattgcaacagaactgcaggcccggccggagcaagtcgactccgccatccgtctgctggatgaaggtaataccgtgccctttattgcacgctatcgtaaggaagtcaccgggggcctggacgacacccaactgcgccagctggaaacccgcctgggttatctgcgtgaactggaagatcgtcgccagaccatcctgaagtcgatcgatgaacagggcaaactgactgaacaattggcgggggcgatcaacgccacgctgagcaagaccgaactcgaagacctctacctgccgtacaaaccgaagcgccgcacccgtggccagatcgccatcgaagccggcctggaaccgctggcggatacgctgtggcaggatccgcaacagcagccggaacaactggctgaacgctacgtcgacgccgacaagggcgtggcggacgtgaaagccgccctcgacggcgcgcgctatatcctgatggagcgcttcgccgaagacgccgcgctgctggccaaggtgcgcgactacctgtggaaaaacgcccatctggtgtccaaagtggtcgaaggcaaggaagaagaaggcgccaagttccgcgactattttgatcaccacgaaccgatttctcaggtgccttcacaccgcgcgctggcgatgttccgcggccgcaacgaaggcgtgctgcagctggcgctgaacgccgatccgcagtttgaggaagccccgcgcgaaagccaggcggagctgatcatcatcaatcacctcaacctgcgcctgaacaacgccccggccgacgcctggcgcaaggcggtggttaactggacctggcgcatcaaggtgttgctgcacctggaaactgagctgatgggcacggtgcgcgagcgcgcggaagatgaagcaatcaacgttttcgcccgcaacatgcatgatctgctgatggccgcgccggccggcatgcgcgccaccatgggcctcgatccgggcctgcgcaccggggtgaaagtcgccgtggtcgacgcgaccggcaaactggtcgccaccgacaccgtctacccgcacaccgggcaagcggcgaaagccgccgccatcgtcgcggcgctgtgcatcaaacacaacgtggagctggtggccatcggcaacggcaccgcttcacgtgaaaccgagcgcttctatctcgacctgcaaaagcagttcggcgaagtccgggcgcaaaaagtgatcgtcagcgaagcgggcgcgtcggtgtattccgcgtctgaactggcggcgcaggaattcccggatctcgacgtatcgctgcgcggcgcggtgtccatcgctcgccgcctgcaggatccgctggcggagctggtgaagatcgacccgaaatccatcggcgtcggccagtatcagcacgacgtcagccagagccagctggcgaagaaactggactcggtggtggaagactgcgtaaacgccgtcggcgtcgatctgaacaccgcgtcggtgccgttgctgacccgcgtggccggcctgacgcgcatgatggcgcagaacatcgtcaactggcgcgacgagaacggccgcttcagcaaccgtgaacagctgctgaaggtcagccgtctggggccgaaggccttcgaacagtgcgccggcttcctgcgcatcaaccacggcgacaacccgctggatgcttctaccgttcacccggaagcctatccggtggtgcaacgcatcctggccgccaccgagcaggcgctgcaggatctgatgggcaacgcctccgcagtgcgcagcctgaaagcggttgatttcaccgacgacaagttcggcgtgccgacggtcaccgacattctgaaagagctggagaagccgggccgtgacccgcgtccggaattcaaaaccgccaccttcgccgaaggcgtggaaaccctcaacgatctgcagccgggcatgatcctggaaggctcggtgaccaacgtcaccaacttcggcgccttcgtggatatcggcgtgcatcaggacggcctggtgcacatctcctcgctggcggacaaattcgtcgaagatccgcacaccgtggtgaaagccggcgacatcgtcaaagtgaaggtgatggaagtcgatctgcagcgtaaacgcattgcgctgagcatgcgcctggatgagcaaccgggcgagggttcaccgcgtcgcggcggcaacgcgcctgcccagacgcgcgacaacaccaaccgttcggcaggcggcaacaaggccaaaccgcgcaacgcggtgccggccggcaacagcgccatgggcgacgcgctggcggcggcattcggcaagaaacgctaagtcggaaccgacagggcggagcctgctccgccctttccgagaaagaaaacttgcggcatttttttgacccgtctcaataaaccttcatctttttatttcccgttgctgcgtgaccgccctcccattgttaaagcggcaaacattccttctgcagccgtttattaacaacgtcgttaacacgcatttttcattttgcgaattgtgagcgaaacacaaatggttaccgctcgcattacggcggaataatgttattgaattgcctttcatcagaaataaataagggaaaaacgccatcaatatttgcaaacgagaaaactcggctacaaatacgcaactgatttaactcaccattctcatttgtcgccgagtaaaagcagtggtaaaacggggcttatcaagacgacacaaccaaaaactgtcgacgccataataattggttacaatacccctatcttttgtgttgaatgcgataatgataattactattatttgcgctcactttattgcatgaccttatggatgaataccgccgacggcgtggcattttcgccggcaacgtccaattatcatcagcccgatgttcatcggcacccggaaggttaatcacatgcagcttcaacctaaacacacatataagattgtcggcttttccggtgaaattgcaccggcctaccgccagaaactgttatcgctcggcatgctgcccggctcttcgttcgacgtggtgcgcgtcgcgccgctgggcgatccgatagaaattaaaacccgccgcgtcagcctggtgctgcgcaggaaggatctggcgctgctgcagctcgacggccagtcctgaaccggcgcgcctccatttgccgacgcgcccttgcgccggcgctgctctccttgaagacgacacgcagaactatgaaaaaactcaccatcggcttaatcggtaacccgaactccggcaaaaccacgctgttcaaccagctgaccggcgcacgccaacgggtcggcaactgggcgggcgtgacggtcgaacgcaaagaaggccatttctctaccccgcagtccgacgtgcggctggtcgatttgcccggcacctactccctgaccaccatttcagagcaaacctcgctcgatgagcagatcgcctgccactacattttgagcggcgacgccgatctgctgatcaacgtggtcgatgcctccaacctggagcgcaatctctacctgacgctgcagctgctggagctgggcattccctgcatcgtggcgctgaacatgctcgacatcgccaaaagccagcatatcgatatcgacgtcgccgcgctgtcggcgcgcctcggctgcccggtagtgccgatgatctccacccgcgccgacggcatcggcgtgctgaaacagatgatcgacaatcatcgcatcaacgaacagcaggcgctggtgaactacccgccgttgctgttgaaagcggtcgccacgctgagcgatgccatgccgcaaacgctgccggcggtgcaacgccgctggctggcattgcagatgctggaaggcgacatctacagccaccggctggccggtcccgccgtcgcgctgctgcctgcggccattcaggcgttgcaacagcagcagcaagaagacccggcgctggtgatcgccgacgcgcgctaccagtctatcgccaccctgagcgacgcggtcagcaactcgcagcaggcgatgcccaaccgcctgaccgacatgctggataaagtgatcctcaaccgctggctgggcgtaccgatcttcctgttggtgatgtacctgatgttcctgctggcgatcaacatcggcggcgcgctgcagccgatcttcgacatcggctcggcggcgatcttcattcagggcattcagtggctcggctacaccctgcacttccccgactggctgaccgttttcctggcgcagggcgtcggcggcggcatcaacaccgtgctgccgctggtgccgcagatcggcatgatgtacctgttcctgtcgttcctggaagactccggctacatggcgcgtgcggcgttcgtgatggatcgcctgatgcaggcgctcgggctgccgggcaaatcctttgtgccgctgatcgtcggtttcggctgcaacgtgccgtccatcatgggcgcccgcacgctggacgcccaacgtgagcgcctgatcaccatcatgatggcgccgttcatgtcctgcggcgcccggctggcgatcttcgcggtgtttgccgccgccttctttggccaggacggcgcaggggtggtgttctcgctgtacatgctcggcatcgcggtggcgatcctcaccggcctggtactcaaatacaccctcatgcgcggcgaagcctcgccgttcgtgatggagctgccggtttaccacgtgccgcacctgaaaagcctgctgctgcaaacctggcagcggttgaaaggcttcgtgttgcgcgccggtaaggtgatcgtggtggccagcatattcatcggcggcctgaacagcttctcgttcagcggcaaaacggtcgacaacatcaacgactccgcgctggccacggtttccaaggtgctgacgccgttgctgcagccgatgggcgtccaccgcgataactggcaggccaccgtcggcctggtgaccggcgcgatggcgaaagaagtggtggtcggcacgctgaatacgctgtataccgccgagcacatcaacaaagaggcgttcgacgccgccaacttcaacctgctcgatgagctgggcggcgcgctgcaggaaacctgggacggcctgaaaaacaccttcagcctgagcgtgctgtccaacccgatcgaagccagcaagggcgacggcgagatgggcgtcggctcgatgggcgtgatgagcagcaaattcggctcgggcatctccgcctacagctatctgatcttcgtgctgctgtatgtgccctgcgtctcggtgatgggcgccatcgcccgcgaatcgagccgcggctggatgacattctccatcctgtgggggctgaacgtggcctactcgctggcgacgctgttctaccaagcggcgaccttcaaccaacatccgcagtacagcctgacggcgatcctggcggtgctgctggtgaatctgctggtgctgttcggcctgcgccgggcgcgcagccgcgtcacggttcgcctgggcaacgccacgccggcggcctgttgtcagggcgccaaagggagctgtcactgatggccgggctgctgcagttgcgcgatgcgctggcgctgcgcggcagtgcccaggcgcagcagctcagccaatcgctggcgacgccgctgccgctggtgcaggcgatgctggatcgtttgacggcgatggggaaagtggagcgcatcgaacaggatgacggcgcctgtttgagcggcggctgcaaaagctgcccgcagggccaggggtgcagcacggtgttctaccgactgaaagcctgaagataaggggcgccaatgacgggcgccccattaccgttcaaggcttattgtttgtctttgtaaacttcggcgatggcgctgaatttaccgtgttcgcggcctgccaggatcacgtagtattgaccgcccttttcgtcagccagtttggacagctcttccttggcgtccatcggtgacgtggtttccgccgtcgtggtgacggtgccgatcttctcgtatttacccgggttcttatccagatcttccttggtcagcagggttgccgccatggagccgaaagacaccgaacccagcactgccgctgcaataatcatcttcaatgatttcatgacactaacctctcaatggataatttatctgttatgaaagccgtcaaaaatccatgcgtagtaccgcaggctgccgcgacatcctcaggcctcgttgctttccctgacggggcccgtttcccagagacgaaacgccaaaatgaaaatcgccgcacgcggtcttttcattttgcagccaacgcattgactcactaagtattgaacagctttgtcttttatccacccggcagcgttttttttcgcgctctatcgtgcgttttcccgctgcattcaatgtgctgcaataaacgcttcgatcatcgtcacaaattcatcgggatgagagataaacggcgcatgggcggctttggccacgatctgcgacgtggagttcggccaggcggcatcgagcagctcggcgaccttgcgcggcactaacccgtccagatagccgtaaatccgcagcagcggcagattcaactccgccagcggcgcgcgcagatcggcggtgcgcaggatctccagcccgccgttcaacacctcgacgctcggcgtcggctggttgagcaccaccgctttcagctggcgcgcatcctgacgcgcgctctcggtgcccagcgtttgcagcgccagaaaacgctcgacggtgcgctggaaatccaggctcagctgatgctggaaaccgctcagcacatccggacggatccccggccacgcatcgcgggcggcaaagcacggcgaggaggccacggtgataagccccttgacccgcccgggctgcatcagcgccgcctggctggccaccagcccgccgagcgaccagccaagccaccaggcctgcggcggggcggccgccagcacgatatccgtcatctgctccagcgacagggcgccgaacccctggctgcggccgtatcccggcagatcgaccagatgcaggcgaaaatgcggcgtcagtcgcgcctggatgcatctccacacttcggcgttcaatccccagccgtgcagcagcacaagatcgcgttcgccttcgcctattgtttgccagtacagcgctgtcattggttactgtcctttcatgcttatccgtgtcggaggccctatgctatcaatccgcagccgctgttggctatgccgacagccgttgagcctggtgcgtcatggcatctgcagttgctgcctgcgccatctgccggtcaaccctccgtgttgcccgcgctgcggattgcccgccggcgagacgcaaatgccctgcggccgctgcctgcaacggccgccgccctggcagcggctggtgttcgtcggcgactacgttgcgccgctcagccaactggtaaaaagattcaagttccaccgcgcgcccgagctggcgccgacgctggcgcgcctgatgctgctgcggtggcagcaggcgcgaagagagcagtatctgaacagacccgacctgattttagcggtacccttgcatgcatcacgctgctggcaccgtggctataatcagagcgatctgctggcccggccgctggcgcgctggctgggctgcgcctatcggcccgccgccttgcgccgggtgcgcaaaaccgccctgcaacagcggctgagcgcccctgcccgcagacgcaatctgcagcgcgcgttcgcctgtaccgtgccggtcgccggccggcatatcgccctggtggatgacgtggtgaccaccggcagcaccgtcgcggcgatcgcggcgctgctgcggcggcaaggcgccgcttcggtgcagatatggtgcgtttgccgcacgttgtagtgccacggcaatgggcgtattataaccgactatagaagtcaactattgagctaatgctatgatccgtataacagatgctgcacaggaacactttgccaaactgctggcaaatcaagaagaaggcacccaaatccgcgtattcgtgatcaacccgggcacgccgacggccgaatgcggtgtctcttattgcccgccggacgcggtagaagcgacggataccgaactgaagttcgacaaactgtccgcctatgttgatgagctgagcgcgccgtatctggaagacgccgaaatcgacttcgtgaccgaccagctgggttctcagctgacgctgaaggcgccgaacgccaagatgcgcaaggtcgatgacgacgcaccgctgatggaacgcgtggaatacgtgctgcagtcgcagatcaacccgcagctggcgggccacggcggccgcgtaacgctgatggagatcaccgacgacaacatggctattctgcagttcggcggcggttgcaacggctgttcgatggtggacgtcacgctgaaagaaggcatcgagaaagagctgctgcagaaattcccggagctgaagggcgtgcgtgacctgaccgagcaccagcgcggcgagcactcttactattgatacccggcgttcgcgccacggtagataacacaatgccggaagggggaacccgttccggcattgtcgttttcagcccaccgacaccttgcggcgccgcttgtccaaatccttcagtaagcggtttatgtgcgggtcggcaaacatctcctccagcgtctgggtcagcttgcgccgccagttagggtactgatcgctggtgccgggaatgttgaccggatccgccatatccagccagtcttccggctgcaggccgagcagagcgctggcgctgtcggcgacatagcgctgcaggccgcggttgagcagcgggctcatgccgagcagcgccgccttcttgcccaccttctgcggcacgcagccatagcgatgcaatccgtccagcaacccctgtttggcgcgttcccgatcggcgaacagcgcctgcaggatctccgcatccgggtaaaggcccagccgattgccgagcgtcagatcgtcgctttgccaatagccgcgcagcgtcggcagatcgtgggtggtgatggtcgccatcgcctgcaccggataggcctgcggcgcgcggaaatggtgctcgccgtcgctttcgaaatagagcactttgtaggagtagacgccgctgtcgcgcagcttgccgacgatctccaccggcaccgtgccgagatcctcgccgatcaccatgcaacggtggcgctggctttccagcgccagcaccgccagcagatcgtccaccgggtatttgacataggcgccgcgatcggcggtttcgccatacgggatccaccacagccgcagcagcgccatgacgtgatcgatgcgcagcgcgccgcagctggtcatgttggcgcgcaaaagatcgatgaacggctgatacccgcgcgctgccatcacgtgcggatccatcggcggcaggccccagttttgccccagcggccccagaatatccggcggtgccccgaccgacgctctcaggcagtacagctcacggtcacaccaggtttccgccccgccttccgccaccccgaccgccagatcgcgatacaggccaatcggcatctgctgctgcctgctctggtcaaaacactgtgcgaactgcgtggccgccagccattgcagccacaggtaaaagcggaccgcgtcctgatgttcggcgcagaactgccgcaccgcatcgctctgcccctgccgatagcgctcgggccaggccggccagccccactggctggcgtctttggccgccagatgggcatgcagcgcatcaaacgccgcctgctgatacaggctgtcgcccccctcagccacgaactgctcgaacgccagacgctgcgcgtcgttcagctggcgcgcctgaaacagcgggaacgccagcttcagcgccgccagcttcagctgcatcacggcggtgtagtccacccactccgcggcgcgcgccttggccagctgcttctgcgtcgccggcttctgccaccagcgctgcgccgcgtcgctgcgctggaaatcctccaccgcattgacgtcgatatacgccagattcagccagcggcgcgacgaggggctgtaggggctggcgctctccgggttggccggatacagcgcatggatcggattgaggccgacgaaggcaccgccgcgttcccccacctgctccaccatcaggcgcagatcgccgaaatcgccgatgccccagttgcgatcggaacgcagcgtatacagctgaacgcaggccccccacagcttcttgccggtcagcaaggcgtccggctcgaagcagcgtctcggcgcgacgatcactcggcatgaccactgctgctcgccctggctcagcgtcaattggtggtaccccatcggcagatcgccgggcagcgtcagggtcttgcgcgcgccgacgcgcccctgcaggcattcgccgtcttcacgctgcagcgcccacaggtactcgccttcacccgccggggtcaacgccagcggcgcgccctgatagaacaccttgaccgccggtaacggtgatgccgcgccttcctgcgcgccatcggcccgattcatggccgccaacagcttgcgcttggtctccggttcaatcgcctgccgcttgccgtgggcattgataaaatcggcagcgatccccgcctgcgctgccgcctgatcgatacgcttgcgatccattcgctctccttaacgtttggcttgccagatacgctgctgataatcgcggatcgagcgatccgagctgaacatgccgacgcgcgcggtgttaaggatagtccgccgcgtccattcgtcccgatcgcgatacagctcgtcgacccggcgctgcgcctggcagtacgaggcaaagtccgccagcaccaggtagggatcgccgccttccagcaggctgtgcagcatcatgtcgaacgcatgcttgtcgccgtggctgaaggcaccgctcgccagctcgtccagaatcgccttcaggtgcttgtctttcttgcggtagctgagcggatcgtaacccttcgccactatcgccttcacctgctccacggtattgccgaagataaagatattgtcttcgcccacctgctcggcgatttcgacgttggcgccgtccagcgtgccgacagtcagcgcgccgttcaacgccagcttcatgttgccggtgccggaagcctctttgccggcggtggagatctgttcggagatatccgccgccgggatcatcaattcggctaccgacacacggtagtcagggatgaacgccactttcaggcgatccttcaccagcggatcgttgttgatcttctcggccgcctggttaatggcgtagatgatgttcttcgccaggtagtaacccggcgccgccttggcgccgaacaggaacacgcgcggcacgatgtccaggttcgggttgtcgcgcagctggcgatacagcgacaggatatgcagcaggttcaggtgctggcgtttgtactcgtgcaggcgtttgatctgcacgtcgaagatcgcgtccgggtcgagcgtcaaccccatcacgccgtgcacgtactgggccagcgccaccttgttgtcgcgtttgatctgctgataacgctggcggaacgccgcgtcgtcagcgaatttctccagcccgcgcagcgcgtcgagatcgttcgcccactccaccttcagcgtctcatcgatcaggcccgacagcgccgggttgcactgtttcagccagcggcgcggcgtgatgccgttggtgacgttatggaatttattcggccatagctggtggtattccgggaacagatctttcaccaccagatccgaatgcagctgcgccacgccgttgaccgcaaagccgctgaccacgcacaggttggccatgcgcacctgcttgtcatggtgtacagccagtttggcccacaccgcctcgtcgcccggccagtgcttatccaccaattttttaaacctggcgttgatctgtttgatgatggagaaatggcgcggcagcaggctgcgcaccaatttttcatcccagcattccagcgcttccggcatcagggtgtggttggtataggcgaaggtgttgctggtgatcgcccaggccgcctcccactccaactggtgctcgtccagcagaatgcgcagcatttccggaatcgcgatggtcgggtgggtgtcgttcagctggatcacttcgtacttcggcagctcttcaatcttgcggccggcctgatggtgcttgcgcaaaatgtccgccaccgagcaggcgcactggaaatactgctgcatcaggcgcaggcgcttgccggcctgatggttgtcgttcgggtaaagcaccttggtcagcttgtcggcttctacgccctgcttctccgcctgcaggaacttgccgtcgttgaaatcgctcaggttgaacggatgctgatgggtcgcctgccacaggcgcagcggctgcgccacgccgttgcgataccccagcaccggcaaatcccaggcttcgccgcgcagggtgaaggcggggcgccacagttcgcggccgtcggcctgcttttccagcttgccgccgatgcccacgtccaccgccagcgcggcgttgtgacggaaccacggatagctctcgcgctgccagttatccggcgcctcttgctgctgcccatcgcggaacgactggcggaacagcccatactgataattcagcccatagccggtggccggttgttctaccgtcgccatcgagtcgaggaaacaggccgccagccgccccaacccgccgttgcccagcgccggatcggtttcctgttccagcaggtccgccagcttgacgttttgctcggccagcgcctgctcgacggtgtcgtaccagcccaggttgatcaggttgttcgccgtcagccggccgatcagaaactccatcgagatgtagtttacgtggcgcagcggtttggcgcttttgcgcggcgccggctgcgcggccaactgctcggccagcgccgcactgacggcttcccaccattgatgttgcgtcatctgctgtgcggaactgaggccgaaccgttgccattgacgggtgagcgccgccagaaaagcatccttcttaagcgtaggctgtgacataaggaaaactctctatccagtaagtgggtcaaattgccgctatcgtgccggtgagaaagcctgacggcatcatcccgcctggggattagctggggaggaggattggggcgtagctggaattgtgatctcaggcactgtttgactcccttgcaacgatgcaaaaaagcccgccaacgcgtgcggcgagcactgagaacgttaaccctgacgttagcacaagtattcgcgctgctgaagttttgtccatggccggaaatgcgatccgccaccgcatcgccgcacgccggcgccaaacgtaaaaaagtgtgatcgatagcaacttaactccaagccgatgcggaagcttgttgcaatacgtttagggttggcagaagttagggggagctattaattacgaaccataaaataattagcgccactccaatcccggcgggaaccgcgatttataccctggaatactatgctgatcccatcaaaactgagccgcccggtacggctgcaaaataccgtgatccgcgatcgcctgctggccaaactggccagcgcgggcaactatcgtctgacactggtcaattgcccggcgggatacgggaaaaccacgctgatcgcccaatgggcggccggcaaggccgatctgggctggtattccctggatgagagcgacaaccagccggagcgtttcgccagctacctgatcgcggcgctgcagcaggccagcggcggccgctgcgtcaagagcgaggcgctgagccagaaacaccagtacgccagcctgtcggcgctgttcgcccagctgtttatcgagctggccgactggcatcaaccgctgtacctggtgatcgacgactatcacctgatcaccaacgacgccatccatgaagccatgcgctttttcctgcgccatcagccggaaaacctgacgctgatcctgctctcgcgcactctgccgccgctcggcatcgccaacctgcgggtgcgcgatcagctgctggaaatgggcacgcagcagctggcgttcacccatcaggaagccaaacagttcttcgattgccgcctggcggcgccgatggaacagcaggacagcagccgcctgtgcgacgaagtcgaaggctgggccaccgcgctgcagctgatcgcgctgtcggcccgccaatccgcctcatcggctcagctgtcggccaagcggctggcggggctgaacgccagtcacctgtccgactatctggtggacgaagtgctggaccacgtcgatggcgatgcgcgcgccttcctgctgcgctgttcggtgctgcgctcaatgaacgatgcgctgatcgtgcggctgaccggcgaagacaacggccagcagcggctggaggagctggagcgccaggggctgtttatccaccgcatggacgacaccggcgaatggttcaacttccatccgctgttcgcctctttcctgcgccagcgttgccagtgggagctggcgctggagctaccggggctgcaccgcgccgccgccgaaggctggctggcgctggggtatccggcggaggccattcaccacgcgctggcggccagcgacgtcagcatgctgcgcgatatcctgctgcaacacgcctggtcgctgttccaccacagcgaactggccttgctggaggagtgcctcaacgcgctgccgtatgagcgcctgatccaaaaccccaagctggcgctgctgcaggcctggctggcgcagagccagcaccgctacagcgaagtcaacactctgctggagcgcgccgagcgcaccatgcgcgaacaaaaaatcgagatagaccaaacgctgcacgccgagtttgacgccttgcgcgcccaggtggcgatcaacgccggcaaaccggaagaagccgagcggctggcgagcgaagcgttgaaattcctgccgctgtcgagctattacagtcgcatcgtcgccacctcggtgaccggcgaagtgcaccactgcaagggcgaactggcgcgcgcgctgccgatgatgcagcagaccgagcagatggcgcgtcgtcatcaggccaaccattacgcgctctgggcgctgctgcagcagagcgaaatccttatcgcccaaggcttcctgcaggccgcttacgaaacccaggacaaggcgttcgaactgatccgcgagcagcacctggaacagctgccgatgcacgagttcctgctgcgcatccgcgcccagatcctgtggtcatggtcgcggctggacgaagcggaagacgcggcgcgcgccgggctgaaaatcctggctaactaccaaccgcagcagcagttgcagtgcatcgccatgctggccaaatgctcgctggcgcgcggcgatctggacaacgccaacacccacctgcagcgctgcgaaaccctgctgcacggcgcgcactatcatcgcgactggctgaccaacaccgacaaatcgcgggtgatccactggcagatgaccggcgacaccgccgccgccgcccagtggctgcgccacaccgaaaaacccggcatggcggacaaccacttcacgcagggccaatggcgcaacatcgcgcgggtgcagctcctgctcggccagtatgaagaggccggcgtggtgctggatgaactgaacgaaaacgcccgccgcttgcgactggtgagcgatctcaaccgcaacctgctgctcagcaaccagctctactggctgcaagagcgcaagggcgaagcgcagcaggcgctgatcgaagcgctgtcgctggccaaccgcaccggctttatcagccacttcgtcatcgaaggcgaagcgatggcgcagcagctgcgccagctgatccagctcaacacgctgccggagctggaacagcatcgcgcccagcgcatcctgcgcgacatcaaccagcatcatcggcacaagttcgcgcatttcgacgagaacttcgtcgataagctgctgacccatccgcaggtgccggaactgatccgcaccagcccgctgacccaacgcgaatggcaggtgctggggctgatctattccggttacagcaacgaccagatcgccggtgagttggatgtggcggccaccaccatcaagacgcacatccgcaacctgtatcagaaactgggcgtggctcatcgccaggaggcggtgcagcaggcgcagcaactgctgaaaatgatggggtacggcgcgtaaaaaccctgatatccctctggtcttaaacgccgcagagttggttacaatagcggcgtccccctattacgaggcagtcagcagtatggaacagttcgaagcgatcaacgttgagcaggcgtacacccgctggaaagagggcagcgccgccctggtcgacatccgcgatccgcaaagttttgaagccgggcatacgccgggcgcttttcacctcaccaacgccaccctgtcggcctttatgcagcaaaacgacttcgagcggccggtgatggtgatgtgctaccacggcaacagcagccgcagcgcggcgcagtacctgctgcaccaggggttcgacgcggtctacagcatcgacggcggcttcgaagcctgggcccgccagtatccgcaagacgtggaaacctctgcctgatccccgccgcccgccgtgcgtcggcgggcttccccttggtttttgtgcgcgttttcgcgggtttttcgcagatccgtttgccagcgctcaggatttcgacgttataatcggccgtcagggtcgccggcgagcaagccgcggccaaaatcattcacttacgacggaagagcaatggttagagtaatcgccatatccaacccgcgcctggcgctggcctttgtcgactatatggcgacccagggcatccggcttgagctgcgcaacagcggcgaggcggcggaaatctggctggccgacgacggtcacctcgagcaggtgcaacacgagctgcagcagtttctggccgatccgctcaaccgccgttatcaggccgccagctggcagaccggccataccgacgccggcctgcattatcagagcgaatcctacctgcacaccctgcgcagcaaggccgggccgctgacgctcggcgtgatggtgctgtgcatcgcggtctatattctgatgcaggcgctgggcgacgataccgtgatgtactggctctcctggccgcaggacagcagccaatacacccagctgtggcgctgggtcagccatgcgttcctgcatttctccctgctgcatatcctgtttaacctgatgtggtggtggtatctcggcggccagatggaaaaacgcctcggcgccggcaagctgttcgtgctggcggtggtgtcggccttcttcagcggctgggcgcaatcgttgttcagcggcgcgctgttcggcgggctgtcgggcgtggtttatgcgctgatgggctatgtgtggctgtcgggcgaacgggcgccggagcgcggcctgatgctgccgcgcggcctgatggtgttctcggtgctgtggctggtggccggatatttcgatattttaggaatgtcgatcgccaacgcggcacacatagccggtttagtgttagggttattgatggcattttgggatacgcgtcatcgcgcacacaacgaacaataacagccgggagctatgccccaatgggcatagcgggcgttttaggggattatcgtgaagcaaacacagcgtcatgacgcaattatcgagctggtgcgcctgcagggttacgtcagcacggaagagctggtcgaacattttgacgtcagcccgcaaacgattcgccgcgatttgaatgacctggcagaccagaacaagatccagcgtcaccacggcggtgcggcgctgccttccagctcggtcaacgctgcctataacgatcgcaaggtgatgtggtcggaagagaaggcccgcatcgcgcagcgcgtcgccagccagatcccggacggcgccacgctgttcatcgatatcggcaccacgccggaggcggtggctcatgcgctgatgaaccacaagaacctgcgcgtggtcaccaacaaccttaacgtcgccaccctgctgaccgccaaggaagacttccgcctgatcctggccggcggcgaagtgcgcacccgcgacggcggcatcatgggcgaagccacgctggacttcatctcccaattccgtctcgattacggcattctcggcatcagcggcatcgatatggacggctcgctgctcgaattcgactatcacgaagtgcgcaccaaacgcgcgattatcgaaaattcccgctgcgtgatgctggtgaccgaccattccaaattcggccgcaacgccatggtcaacctgggcaacatgaacctgatcgactacctgtttaccgaccaactgccgccgccgagcgtgatgaaaatcatcgaacagtacgacgtgcagctggagctgtgctgatccggccttaacctgcggggcgcgccgccgccccgtttcatcccttcagactcccctcaccgacagccgtttgcgcgcccgcgccatatccacactatttatgtgactatcatcaccaaactgttacctctatcacgcctaaatgtttttgtttggttaactcttggcttgcttgttggtttttgattacaatcatgagcgaaaacgaacatgaaagagctatttcgaacatctggaggaagatgacgtggaaaccaaagacttgatcgttatcggtggcggcatcaacggtgccggcatcgcggcggatgctgccgggcgcgggctgtcggtactgctactggaagcgcaagacttggcctgtgctacgtcttccgccagttccaaactgatccacggtggcctgcgctacctggaacactacgaattccgtctggtgagcgaagcgctggccgaacgtgaagtgctgctgaaactggcgccacacatcgcgttcccgatgcgtttccgcctgccgcaccagccgcacctgcgtccggcctggatgatccgcatcggcctgttcctgtacgatcacctgggcaaacgcaccagcctgccgggcagcaagggtttgcgctttggaccagagtcggtgctgaagcctgaactgaagcgcggtttcgaatattccgactgctgggtcgacgatgctcgcctggtggtgctgaacgcgcaggaagtggaaaaacgcggcggcgaagtgcgcacccgcaccaaagtgacccgcgcatggcgtgaaaacggcctgtggatggtggaagcggtcgatatcgacagcggcaaaaccttcacctggcgcgccaaaggcctggtgaacgccaccggcccgtgggtgaaaaacttcttcgacgacggcctgaagctgaaatcgccttacggcatccgcctgatcaaaggcagccacatcgtggtgccgcgcgtgcacgatcagccgcagtcttacattctgcagaacgaagaccaccgcatcgtgttcgtgatcccgtggaatgacgagttctccatcatcggcaccaccgacgtggagtacaaaggcgatccgaaagacgtgaagatcgacgagaacgaaatcgcttatctgctgaaagtgtacaacgatcacttcaagaagcagctgggccgcgacgacatcgtctggacttactccggcgtgcgtccgctgtgcgacgacgaatccgattcaccgcaggcgatcacccgcgattacacgctggacgtgcacgacgagcagggcaaggcgccgctgctgtcggtgttcggcggcaagctgaccacctaccgcaagctggccgaacatgcgatggaaaaactggcccactactacccaggctgcggcccggcgtggaccaaaaatgccacgctgccgggcggtgacatcgacggcgaccgcgacggttacgcggccaaactgcgccgtgcgcacggctggctgccggaagccctggcgcgccgctatgcccgcacctacggcagccagagcgagctgatcctggccggcgccaacggcctcgccgatctgggcgaagatttcggccacggtctgtatgaagccgagctgcgctacctgaccgagaaagagtgggtcgtagagctggacgacgccatctggcgccgcaccaagctgggcatgtggctggacgaagcgcagcaggcgcgagtgaaagcctggctggcggaacacgcgaaaacgaaagcgctgtctttggcttcctgagctgcagcgtaacgaaaaagggccggttatccggccctttgcttttttcctctctcgctttacagtttcaccggcttaatgtgccaaatttcatccgcgtattcctgaatggtgcgatcggatgagaagtagcccatattggcgatattcagcaccgcgcgccgcgtccactcgtcctgattgagatagacctcgtccaccttgtcctgcgtgtccacatagctgcggtaatccgccaacagctgatagtgatcgccgaggttgaccagcgagtcgaacaaattgccatagcgtttcggctcttccgggctgaacaccccggtggcgatctgcgtcagcgcctgatgcagctccgggtcctgctcatagtactggcgcgggttgtaaccgttgcggcgcagttcctcaacctgctcggcggtattgccgaaaataaagatattctcctcccccacgtgctcacgcatctcgacgttggcgccgtccagcgtgccgatggtcagcgcgccgttcagcgcgaacttcatgttgctggtgcccgaggcctcggtgcccgccagcgagatctgttccgacagatccgccgccgggataatgatctgcgccaggctgacgccgtagttcggaatgaacaccaccttcagttgggtatgcacgcgcggatcgttgttgatcactttggccacatcgttgatcaggcggatgatctgcttggcggcatagtaggctgaggccgccttgccggcgaagatcaccacccgcggcacgcgctcgatgtcagggtcggccagcaaacggttatacagcgtgatgacgtgcaacacgttgagcaactgccgtttgtactcgtggatgcgtttgatctgcacgtcgaacagcgcatccgggttgaccaccacgttgagcgttttggcgatgtacagcgccagccgctccttgttctgccgcttggcgcgctgcaccgcctgcaggaagctcgggtaatcgatgttggccttgatctcgctcagctggctgagatcggtgcgccaggtttggccgatgcagtcgtccagcaccgccgccaacggcgggttggccagcgccagccaacgacgcggcgtcaccccgttggttttgttgcagaaacgagtcgggaacagccgggcgaagtcggcgaacagcgactgcaccatcagttcggaatgcagggcggaaacgccgttgaccttgtggctggccaccaccgccagccacgccatgcgcacccgacggccgttggtttcgtcgatgatcgagacccgcgccagcagatcgttgtcgcccggcgccacttcctgcaccatcttgaggaagtgatcgttgatttcgaaaatcagctgcagatgacgcggcaagatgcggccgagcatgtccaccggccaggtctccagcgcctcgctcatcagcgtgtggttagtgtaggagaatacctgctccaccacttcccaggcgtcgagccacttgaacttgtgctcgtcgatcagccggtgcatcagctccggaatcgacaacaccgggtgagtgtcgttgaggtgaatggcgatcttgtccgccaggttgtcgaaggttttgtgcatcagccaatggcgattgagaatatcctgcaccgtggccgacaccaggaaatactcctgccgcagccgcagctcgcgcccggacgaggtcgaatcgtccggataaagcacgcgcgacacgttctccgaatggtttttatcttccaccgccgcgaagtaatcgccctggttgaacttgccgaggttgatctcgttactggcctgcgcgccccacaaccgcagcgtgttggtggcgtcggtgtcgaaaccggggatcacctgatcgtaggcgatggccacgatttcttcggtctccagccagcgggccttggccccctcctgctgcacgcggccgccgaagcgcaccttgtagcgggtgttatggcgcggaaactcccacggattgccgtactccagccagtagtccggcgattccatctgttggccgttgacgatgttctgcttgaacatgccgtattcataacgaatgccgtagccgcgccccggcagcgccagcgtcgccagcgagtcaaggaagcaggccgccagccggcccagaccgccgttgccgagcccggggtcgttctcttcctccagcagctccgccaggttcagccccatctcgttcaacgcgttgtcgatgtcctgataaatgcccatcgacagcagcgcgttcgacaacgtgcggccgatcagaaactccatcgacaggtaatacacctgccgcacgtcttgagacagctgggcgcggttggaacgcagccagcgctccaccatgcgatcgcgtaccgcgaacagcacggcgttcagccaatcgtgccggttggcgatggccggatccttgccgacgataaacatcagcttataggcgatggagtgtttcagcgcttccacactgaccgtaggtgaggtgtaactaaacggtgaagtcatggctttttaatcccttgtagggagccccgccattcgccgcggaatagcgggctccgctgaacatggacgcggcacgccgcgccccgacaatctacccttacggctgcccgccgcgcgtcaacccgaaacgcgaaacgcgggctacaagcgttgataaagcgataaatactctttcgccgccaccggccagccgaagtccacgctcatggcgtggcgctgaacgtggcgccagtgtttcggccggctccacagcaccatggcgcggcggatggcgttgcccagcgcgacagcgtcgcaatcgtcgaacacgaatccgctggcggtgccgtcggccaggttctccagcgcgcagtccaccaccgtgtccgccagcccgccggtacggcgcaccagcggcagcgtgccgtatttcaggccgtagagctgcgtcaggccgcagggctcgaagcggctcggcaccagaatgacgtcggcaccgccgatgatgcggtgggagaaggattcgtgataaccgatctgcacgccgacctgttcagggtagtcggcggcggcggccagaaacgcctgttgcagcaccgcatcgccggcgcccagcagcgccagctgcccgccctgcgccagcagttcaggcaacgcctgcagcaccagatcgaggcctttctggctggtcaatcggctcactaccgcgaacaccggcagtgattcgtccaccttcagccccatggccttttgcagatgcagcttgtttttgaccttgcttttcagatcgtcggcgtcatagcgggcgctcagccgcgggtcgtgggccggatcccaaatcttgtcgtccaccccgttgaggatgccgctcagcctgccctgccgctgccgctcctgcagcagcccctccatgccgtagccgaactccggccgggtgatctcacgcgcataggtcgggctgacggcggtcacgtggtcggcataaaacagcccggccttgaggaacgacatctggccgtagaactccaggccatagacgttgtagaacgacgccggcagccacagctcggtcacgtgatgggcggagaacagcccttgataggccaggttatgcaccgtgaacaccgaacgcgccgggtggccgttggcggccagataggcgcagctaagaccggcgtgccagtcgtgagcatgcaccagctgcgggcgccagtagcgatccagccccttggccagctcgcaggccatccagcccagcagcgcaaagcggcggtggttgtcggggtaggcatacatggactgatcgtggtacgggctgcccggccggtcatacagccagggcgcatcgatgagatagatgcccacaccatggtaggtgccgtaacgcaggccaacccggccggcgaacgagtcgatttccgccaccagcacggtgtcgggtatgccgttgcgtacgtcaggaaaagcgggcaatagcacccgaacatcggcgccttcggcgatttgcgccgccggcagcgcgccaaccacgtctgcgagtccgcccgttttcagcagggggaacatttcagaacatacgtgtaagacctgcattatcactcctgaaagtcggccgaaggcctctggataagaaataaagcaggcttgccgctgttatgtgtgccgcgttgcgcaagccatcgaaccgttcatcgggcggcaggctatcgttctgcccccacgttaactcacaattttgacaacatttcgcgcgtcaccagcacgatgccgccttccgagcgatagaaacgcttgctgtcctcatcggcgttttccccgatcaccatgccctccggaatgtggcaggcgcggtcgatgatgcagcgccgcaggcggcaggaacggccgacgttcacgtccggcaacaatacggtagagtcgatggtgcagaacgagttcactcgcacgcgcgggaacagcaccgaatgcaccaccaccgatccggacacgatgcaaccgccggacaccagcgagttcatggtcatgccgtggctgccggagcgatcctgtacaaacttggccggcggtagcggctccatgtgggtgcggatcggccaggcgcggtcgtacatgtccagctccggcgtcaccgacgccagatcgagattggcgcgccagtaggcgtccagcgtgcccacgtcgcgccagtacggcggcagatcggggttggacgtcacgcaggacaaggtaaacggatgcgcccacgccgcctgctgcgcggtgattttcgggatcagatccttgccgaaatcgtggctggagccgggggtcgacatatcctcttccagcagttggaacagataggcggcattaaaaatatagatgcccatgctggccagcgacatatccggattgcctggcatcgccggcggatcggcgggcttttccagaaactcgatgatacggtcgctttcatccaccttcatcacgccgaattcgccggcttcgctgcgcggcaccggcaggcaggccacggtgcactgagcgcctttctcgacgtgatcgatcagcatgcgtgaataatccatcttgtagatgtgatcgcccgccaggatcaccacgtattcggcctcgtagcggcggatgatatccaggttctggtacaccgcgtcggcggtgcccttgtaccaatgctcggtgctgaggcgctgctgggccggcagcagatcgacgaactcgttcatctcctcgttgaggaacgaccagccgcgctgaatgtgctgcaccagcgtgtgcgactggtattgggtgatcacgccgatgcggcggatgccggagttcaggcagttcgacaaggcgaaatcgatgatgcggaatttgccgccaaagtggacggcgggcttggcgcgggtggaggtcaaatctttcaaacgtgagccgcggccgccggccaggatcagcgctacggatttaatcggcaactggcgcgccaacatcagggggtctttattttcaaacctaaccatagcggactccttttattatttccgtaccagaacgcaaagcgagcgcgcggcctggtgccaggcgggcaataccgcccgtgagtcttcctgagtgaacggggcgacaacctgccaatcgccttccggcaatctcatctccgtcgtttgcggcgtggcgttgaccagcaacagccagcgctgcgacagcaggatctgcatgagcagctcgccccgctcccactgctgcgcgtcgagcggctggccttgcgcgttcagccactgcacgctgccgtcgtcctgctgccaccagcggtcctgctgcagcgcggggatctggcggcgcagcgcgatcagcgccgcgacgtaatcggtcagcgcgtcatccgccgtggcccaatcgagccaggtggtggcgttgtcctgacaataggcattgttgttcccctgctggctgtgtccctgttcatcgccggccagcagcatcggcgtgccctgggacagcaacagcgtggcgagcatcgcccgctggctggccctgcggcgttgcacaatggcgtcgtcggcgaccaggccttccacgccgtggttgttgctgaaattgcgatcgctgccgtcgcggttgccctcgccgttgggctgattgtgtttctcgttgaaactgaccacgtcttgcagggtaaaaccgtcatgggcggtcagcatgttgacggtggcgtaaggcgcccgcccgcgctggttgtacagatcgctggaagcggcaaaacgccgggcgaactggccgagcgacacgccgctctgcagccagaaacggcgcatgtcgtcgcggtaatgatcgttccattcggcgaagcggccgggaaatgcccccacctgatagccgccggggccaatgtcccagggttcggcgatcagcttgcagcgcgacagcagatcgtccgccagcatcgcctggaacagcggcgcatcgcgatcgaaccccggcgtgcggcccagcacgctgcccagatcgaagcggaaaccgtcgacgtggcactcccgcacccaaaaatgcaggcaatccatcacccaggctacgccctgcggctgatccaaccgcagcgtgttgccgcagccggtgtcgttgacgtagtccccttcgggcgtcagccagtagtaactcagattatcgatgccgctcagcgacaacatcggcccatccctgtccagctcggcgctgtggttgaacaccacgtcaaggatcacctcaatgccggcttggtgcagcgccttgaccgcatcgcgaaattcgttgagcggcgtggcatcggtgctcaggctggcgtagcggttgtccggcgcatagggcgccagcacgttataaccccagtagttgatcagccccagccgctgcaggcgcggttcggaggtatgttgctgcaccggcagcaattccagcgcggtgatgccgaggcgtttgaagtgggcgatcatcgccgggtgccccagcgcggcgaaactgccgcgcagcgccggcgggatctgcgggtgcagcagcgtcaggccgcgcacgtgcgcttcgtaaatcaccgtctgtccccagggcgtggcgggcgggcgatcgtcctgccagtcatactgttcgtccaccaccacgcacttcggcatcagctcggcgctgtcgtgcgggtccggctgctcgtaaccgccgtgcaggtgcgggtggtccgccaccggcccttccaccgcgcgcgcggccggatcgagcgccagcttgttggggttgaagcgctgcccgttcgccggatcaaacgggccgtagacccggtagccgtaacgttgccccggcctgccgcccggcaaatagccatgccaaatatcgccgctgcgcgccggcagcggcaggcgcacttcgcgctgctggccgtcgaacaggcacagctccacccgctcggcatgcgccgaatacagggtaaaattgatgccttcgccgtcatactgcgcgcccagcggcgcggcgcggccagccgtcagctcggtcatggcgcctcccgcagcagataaatggtcgacaatggcggcaacgtcacgctgatagagaaatcgcggccatggctgccgaccatttcggaagagacccgcccctgattgccggcgttgctgccgtgatagtggtgcgaatcggtattgaggatctcgcgatagtcaccggcgcgggaaatgccgatgcggtagcggtagcgcggcaccggggtaaaattgctgatggcgatcagctcattgccctgcgaatcgtagcgcgcgaaggcgaacaccgagttatcgtgatcgtcgaccaccagccactcgaagccatccgggaagtagtcgcgctcgtacagcggcgcctgctgccggtagcagtggttcagatcgcgcaccagccgctgcacgccgttatgccagttatccagcccttccaataaatgccagtcgaggctggtatcgaaattccactcgcgcccctgcgcaaattcgcagcccataaacagcagctttttgcccggatgcgcccacataaaaccgtaataggcgcgcaggttggcgaacttctgccaggcgtcgcccggcatgcggtcgaggatcgattttttaccgtgcaccacttcatcgtgcgagataggcaacacgaagttctcggtataggcgtacagcatgccgaaggtcatctggttgtggtgatacttgcggtgcaccggatcgcacttcatataattgagcgtgtcgtgcatccagccgaggttccatttgtaatggaaccccaggccgttggcgtccggcggcagggtgacgccgggatagtcggtggactcctccgccagcgtcaccgcgcccggctgcgcctggccgatagtctggttggtataacgcaggaaggcgatggcctccagattctcgttgccgccgtagtaattcggcacccattcgccgtcggcgcggctgtaatcgcgatagatcatcgacgccaccgcatcgacccgcagcgcgtcgatgccgaaacgctccagccaatacagcgcgttgcccgccaggtagttgcgtacctcgtgacgaccgtagttgtagatcagggtattccagtcctgatggtagccctcgcgcggatcggcgtactcgtacagcgcagtgccgtcgaaattcgccaggccgtaggcgtcgctcgggaagtgccccggcacccagtcgaggatcacgttgatgcccgcctcatgcgccgccgccacaaacgccctgaagtcggccggcgtgccgaagcgccgggtcggcgcatacagccccagcggctgatagccccagctgccgtcgaacgggtgctcgttgatcggcagcagctcgatatgggtgaatcccatgcccttcacataatcgatcagttgcactgccagctcgccgtagctgagccagaagtggttgtcagtgtggcggcgccatgagccgagatgcacctcgtagatggcgatcggctggtcaaaatcgttggcgcggcggcgcgccggcgtcgacggcaccacctccggcagcggcgccaccagcgaggcggtatccgggcgcatctgcgcctcgaaggcgtcaggatcggctttcaactgagtattgccgtagcaatcgacgatttcatatttgtacagctggccggcctgcacgccgggcaagaacagctcccagatgccgttttcacgccgcagacgcatcgggtggcggcggccgtcccagaagttgaattcccccaccaccgaaacacgctgggcgttgggcgcccagaccgcaaagctgacgccgtcgattccatccagcgtgacgaggtgggcgcccagccgttcataggggcgcaaatgcgtaccctcagccaatagccaactgtcgatatcctgcagcagcgggccgaatcgataaggatcgtcgacgatctgttgatgatcgcgccagctgacctgcagctgatagcggaaaggatttttgcgccgcggcaccaccgcgctgaagaaaccgcgcggatcgtcgcagttcagctgcaccagccgccggccggtttgctgttccaccagccagactgcgccggcgtccggcagcagcgcgcgcacctgcagaccgttatcggtcgcatgcatgccaagcagagcgaagggatcggcgtaatggccggcgatgatctgatcaatcacgtcacgatcgggaagtacaggcatagtcttcttccttagattaacagcatgatctaagcacggcttgttgattattccttggccgttttggtcatcatgcaatgcattcggactctaaagcgtgattgcggtcggttattgaccaatctttactctgccgacctgaatttcgctctttatgcttattttttgaaatatttcagtcatggtgaaaaattgtccacccatgcgttaagcatagccaatgtctgttaaaaactgctcagcattgctcaggaaaattattcattaagaaaactgccagcctggcggcgtttgcatgcggcggctgacgaggagataggcgggatcccgcccattgaaacgaggctggcgatgacgctgcccgacgcggtgcgcggcgaacaaaaaagcggaaaataaggcattagggggctgaaagcagccagccccctggaagtgcgggtttacagcaggatacgcagcatgcggcgcagcggctcggccgcgccccacagcagttggtcgcctacggtgaacgccgacaggtactccggccccatattcagcttgcgcagacggccgaccggcgtattcagcgtaccggtcaccgccgccggcgtcagttcgcgcatggttagttcgcggtcgttcgggatcacgcgcacccagtcgttgtgcgtcgccagcatctgctcgatttccggcagcgacacgtcttttttcagcttcagagtgaacgcctggctgtggcagcgcagcgcgccgacgcgcacgcacagaccgtcgaccgggatcacgctgccggtgttgaggatcttgttggtctccgcctggcctttccactcttcgcggctctggccgttgtcgagctgcttgtcgatccacgggatcaggctgccggccagcggcacgccgaagttatcggtcggcagtttgccgctgcgggtggcctcggtcaccttgcgttcgatatccagaatggcggaggccgggttctgcagctctttcgccacgtcggcgtgcagcatgcccatttgggtcagcagttcgcgcatgtggcgcgcgccgccgccggaggccgcctggtaggtggcgaccgacgcccactccaccagatcgttggcgaacaggccgccgagcgacatcagcatcaggctgacggtgcagttgccgccgacgaaggttttgatgcctttgtccaggccctgctgaatcaccgcgtggttgaccggatccaggatgatgatggcgtcgtcctgcatgcgcagcgacgaggccgcgtcgatccagtaaccctgccaaccgctggcgcgcagcttaggatagacttcgttggtataatcgccgccctgacaggtaataatgatatcgagcgcgctcagcgcgtcgatgtcatacgcatcctgcagcgtgccctgctggccgccaaaggccggcgcggcggaaccgtgctgcgaggtggagaaaaagaccgggcgaatggcgtcgaaatcgcgctcttccgtcatgcgttgcatgagaaccgagccgaccattccgcgccaaccgatgaaaccaacgtttttcataatatctgtgtcccgcccggataagggcttattaggtgataacgagttgtgtgcaatatctcctcaccttacaaaatgtcggcgcgggcgcaaagtgaatttattcgatggctggggatttctcagcaatccttcttataggcaaggacgcggccgtaaaggccgaggcgttttcccgatcacgaggtcaccatgacagagatgatttccgctacggtattgctgtttttaattatggatccgctgggcaacctgccgattttcatgtcggtgctcaagcatctggagccgcgccgccgccgggtggtgctgatccgcgaactgctgatcgccctgctgctgatgctgatctttctgttcgccggcgagaaaattctggcgttcctcaacctgcgcaccgaaaccgtctccatttccggcggcatcatcctgtttctgatcgccatcaagatgattttccccacgcaggaggggaacagctccgggctgtccgccggcgaggagccattcctggtgccgctggcgatcccgctggtggccgggccatcaattctggcggcgctgatgctgctgtcgcaccaatacccgcatcagctgccgcatttggtggcggcgctgctgatcgcctggggcctctctgcggccattttgctgatgtcgaacctgttcctgcgcctgctgggcagcaaaggcgtcagcgcgctggagcggttgatggggctgattctggtgatgctgtcgacccagatgttcctggacggcgtgcgggcttacatgaagctgtaggcgcctggcggcgccgacaacggtccgcgctcagcgggcggtaacgcggcgaatataggcgagcgtatcggcaaccacgccgtccaacggctggttgatgtcgatcgcttgcacatccggctcctgctcgcccggctcttccagcgtggcgaactgggaaatcaacatctgcggcttgaagaaatggcccttgcgttgcttcagacgctcctcgatcactgactggtcgcctttcagatacaggaaatgcaggttgagattgccgtcgcgcaggcgatcgcgatagcttttcttcagcgccgagcacaccagcagcgacacgtcgttggtgcgctgcatggcgaagatggcgtcgttcagggccgccagccacggcgcgcgatcgttgtcgtccaacgcatgcccggaggacattttgatgatgttggcgcgcgggtgcaggtaatcgccgtccagcatggcggcgttggcctggtgagcgacagcgctggccacggcggatttgccgctgccggaaacgcccatcaaaacaaatacgtgattctgcggattgctcattgtgtcatgcccttatgggaactggcgcgagcgcgccaaatgcgtcccaactgataaagatactctggaacgccgacgccccgcagggcgccggataaagattatacgaccgtcgccagcagcagacagcccaccaggccgcacaccgagataatggtttccagcaccgaccaggatttgatggtttccatgatgctcaggttgaagtactccttgaacagccagaagcccggatcgttgacgtgcgagaagatgacgctgccggaaccgaccgcaatcaccatcagctcagggctgacgccggtggtggcgatcagcggcgccacgatgccgccggcggtgatcgccgccacggtggcggaacccagcgccagacgcagcgcagcggcgatcgaccaggccatcaggatcggcgaaacgttgctgccttccatcaggccggcgatgtacttctcaacgccgctgtccaccagcacctgcttgaaggcgccgccgccgccaatgatcaacagcatcatggcgatgattttaatcgagtcggtgatggtgcccatcacttcatccatggtacggccacggttcaggccgaaggtgaagatggcgatcagcacggcgatcagggtggccatcaccgggtcgccgaagaactcggcgaagcgcagcaggctgtggcccttcggcagcaccatttcagcgaccgcgcgcagcgccatcaggatcaccggcaccagcgacgtggcgacgctgacgccaaagcttggcatctccgcgtcggtaaaggttttcgggttgtacaggccttccggcaccggcttgtcgatgcctttcaggaagcgggcatagaccgggccggccaggatcaccgtcgggatcgccagcagcgtgccgtacagcagggttttacccatgtcggcatggaagatggtggcgatggcggtcgggcctgggtgcggcggcaggaagccgtgggtcaccgacagcgcggcggccatcggcacgccgacgtacagcagcgggatacgcgcggaggcggcgatggtgaacaccagcggcagcaacagcacgaagcccacttcgtagaacagcgcgaagccgacggtgaagccggtcagcaccaccgcccattgaatgtgttttctgccgaacttgtcgatcagcgtggtggcgatgcgctgtgcgccgccgcagtccgccagcagtttgccgagcatggcgccgaagcccatgatcagcgccaggctgcccaacgtgccgcccacgccggccttgatggagccgatgaccttatcgaccggcataccctgcgcgatcccgaccgccaaagcaaccagaaccagagagataaagccgttcagcttgaagcggatcatcagcagcagcagcagcgctacgccgcctgcaacaatcactaatggcatagtttttctccaaccttttatcgcgactctctttacaataggcgtaaagcgtgcggttgttttatttttaggctctttcccggtgtttaagaagagctgtaggtgttgttgagtcagaggttcagtcttgcagcaagatgaccgcgcactcgttgttaccggtatcatgataccggtaacaacatgagcgccggaaccgggtaaccggctaaaattcgcgttctgggacagagatcaaacttatgccggcaacgagcggcgggcttacaggcggggtaaccagcgcgcctcagggcgcgctgtaaaaagaaagagtgttaaaacagaacgttaaaatggctcagatgctgccgccggggatcacggtgaaaccgacgtccaccatgcgcgggcacaccgtttcgccgcgcagccgggccagcaagcgctcggcgccgatctggcccatgcgttcgcgcggcgtcagcacgctggccagcttcggcaccatcacctggccgatgtcatggccgtggaaaccggcgatcgccatgtcctgcgggatcgacagcccttgccgctggcattcgaaggccgcgccgatcgccaggtcatcgttggtgcagaagatactgtcgatctgcgggtagtcacgctgcgcctggcgcaacagctcgccgccggcggaataagaggaagaacgcgcggtcatgatgctgtacggctccaggccggattcacgcatcgcctgctcatacccctgctgcttgatgatggtacgctcatcctgacgagcgccgaaatagaccacgtgacggtggccgtgcgcgatgatctgctgggtcatctggcgcgccgcctcgaagttgttgaagcccaccgccagatcgatgcacggtgagacgcagtccatcagctccaccaccggaatgcccgccacctcgatcattttcagggtgcgcggcgtgtgatggcgctcagacaggatcaggccgtcgatattgtaagacagcagcgaggtcagacgctcttcttcacgctccggcaggtagccatagtgcgccagcatggtttggtagttgtgcgcgtcggttacgctttcgatgccgcgcagcacttcggcgaacacctggttggtcagcgacggcaacagcacgccaatcgcccggctggtggcgttggagaggatatccggcgcgcggttggggatgtagcccagctcatccagcgcgacggcgattttttgctgcagggcggcggaaacctggtcgggattgcgcagataacggctcaccgtcatcttggtcacgcccaccttgtccgccacatcctggagtaccggccgttttttcttcattatcaatgaactgactaaccgtgaatgggcaatcattttagcaaaaaaaacggcgggccgatattgtcggttatgcgacagccaacgcaaaaagggctcacacagtgagcccttcatacgctgacaaagggggaaaaagcgtggtttttccccctttgtgatgattagccgaaaatcaataaattgattttccttgtttttatatgctggcggcgtcaagtcaggcaacatcgtcagacgtgtcattaacctcaagggctcacaccgtgagcccttgaaatttaccgcttaatcacaccggcggcagatcgaacagcaggatttcgctctcttcgtcggcctggatcgtcagcgccgattcatcccacaccgcgaacgcgtcgctgatgccggcggtctggccgttgaccgagaccttgccgcgcaccacctggatccaaacgcgacggccggcggcaatcgggcattccccctgctcgcccttattcagcgcccaacgcgacagcgtcatatcctggaacaccttcagcgagccgtcacgcgcatccggcgacagcaccagctgacggccctgcggcgcgtcgaacatgcgctgctcgtagcgcggctccagcccgacctgatccgggatgatccaaatctggtacaggtgcaacggacgatcctgattagcgttgtactcagagtgacgcaccccggtgcccgcactcatgatctggaattcaccggcctggatctgctccttgttgcccatgctgtcctgatgttccaccgtaccgctcagcacgtaggtcaggatttccatgtctttatgcgggtgagtaccgaaaccctgccctgcgtcgatcacatcttcgttgatcactcgcagcgccgagaaccccataaagttcggatcgtagtaatcggcaaatgagaaggtgtgccagctatccagccagccatgattggcgtggccgcggtcttccgctttacgtacataaatcattttcaactctcctcaatgtttttttacagtctagtcctgccagcagaataagaaagcgtaaaaaactcatgcctctgttcaaaaatttcgatggaatgaaacagcggatgggcagcggatttgttgaaagcggaaccggctgaaaaagggcaaaaaaaaagccagcacccgagctggctaagtaaacactggaagcaatgtgagcaatgtcgtgccttcgcagcgagagtatcaaggattgatgccctccccggaacgcatcgcaataataatcattatcattcgcacctgtaaagcgttttttttgacccgttgaaataatattgactcaaggcagtaaacggataaattcagaggttattcaaccggtaagcaaaaggagcagcgagatgagcgagatcgtgatacgccacgtggaaacatcggatgctcaggctctgcatcatctttattctcagacgcccgtctaccgcgatacgctgcagctcccgctaccgtccgtcgagtcctggcagaaacgcctcgccaaccccgaaccgggcacgcataacctggcggccttcgttgacgggcagcttgtcggtcagttagccgtgatgctgaatcagcgcgttcgccgccgccacgtggccaccttcggcatcggcgtcgatccgcgctaccacggtaaaggcgtcggcagccgcctgatgcaggcgatgatcgacctgtgcgacaactgggcggccatcgagcgcatcgaactgacggtgtttaccgacaacccggcggccatcgcgctgtatcgcaagttcggttttgagattgaaggcaccagccgcgctttcgccattcgcgacggcgtgctggtcgatgcctaccatatggcgcgttttcgctccgggcagccgcgcggcgatgcgtgatctcatccccccgcaggggccgctgcgccggcccctgaatatcaaccgccgaacctttttacacgcgctggccggcctgaccgccgccggcatgttctcccccttcaccccattaggtgccgctatgccaacttccgccgccgggcgccctggcgcccgcaacctgattaccgatgtgcccggcctgaaggtcggcgtggcgcaggacagccgggtgcgcaccggcgcgacggtgatcctgccggacagcccggcgattgccgccgtggacgtgcgcggcggcggccccgccacccgggaaaccgacgcgctgggtgaagacaatttggtacagaccgtcgatgcgttgacgttcagcggcggttcggtatacggcctggcggcggcggacggcgtcgcggcctggctcgggctacaaggcagaggctatgcgctgcggccggctcccggcgtgccggtctcacctatcgtgcccaccgcctgcctgtacgatctggccaacggcggcgataaaaactggcagctcacgccgccgtatcgccagctgggcatcgacgcggtcggcaaggctggattggactttccactgggcaccgtcggcgccggctacggcgccatgacctgcatgggcaagctgaaaggcgggctcggttcggcatcgatcgttgccgccagcggcgctaccgtcggcgcactggtggcggtcaacagcctgggagcggtggtggcgcccggcacccgcgccttctgggcgacgccctatgaaattgacggtgaattcggcaacggcggcgcggcggcgctggcgcaactgcgcgcgcagggcgaagactggatggtgcaagagccgcaaggcggcagaaagaacaccaccctggcctgcatcgccaccgatctggcgctgacgcgtgtggagttgaaacgggtggccatcatggcgcaagacggcatggcgcgcgctattcgcccgctgcacagcccgtttgacggcgacgtggtgttcgccctgtccaccgggcagcgcgaggtacagggcagccgcgaactggcggtgctgcagatcggcgcgctggcggcggacaccctcgctcgggcgatcgcccggggcgtatacgccgccacgccgtggccgggcagccaggtcacaacctggcaaacgctcggcggctaacgcgccgccatcaaaaaagggggccggtggcgcccctcgatctttattgccccccaccgcctaaataccggcagtttcccgaatataacggcgcgccttcaccgcatactcgaacgggttggccagcgccggatcctgctcggcctccaccaccatccaccctttgtaaccgcgctcgtccagcagcttgaacaccggcctgaagtcgatcacgccatcacccggcacggtgaaggtgcccttcttcacgccgtcgaggaagctcagcttgttggccttcacttccgccaccacctcatcgcgcacgtccttcaggtggacatggttgatgcgcggcagatacttctccaggatcgccatcatcgcctgttggctgccttccgaatagtaggcgtggccggtatcgaacagcaggtaaacgtcgtcgttgaccatgctcatgtagcgatcgatttcggccgtggtctgaatgccggtgcccatgtggtggtgcaggcacacctgcatgcctttatcggcggcgatcttcgccaactcgttgtaaccgtcggccacgcgctgccactcttcatcgctgaagtacggcttctcttcgaacacgcctttggtggtgccctgaatgctcttgctctgctctgagcagccaatcaccctggcgcccatggcatgcaggaaattcatgtggttgataaattcatcaatggttttgtctttctggccgtcggcgaaaaaggtgctgaaccaggcgttgcagatctggatgccgcgaatatccagcatcggtttcagcaccgccggatcgcgcgggtatttgctgcccacttcgctgccggtgaaaccggccagcgccatttcactgacgcattgctggaaggtgttctccttgcccagatcgggcatgtcgtcgttggtccagccgatcggcgcaatggccaatttcacgttgtctttattcatggtttgcctcggtccttgcagggccgccggtacaaacgccgccggcgagccgaatcagattatttgcccaacagctctctttcgatgcgttctctggtcgccaccgcctggctcggcatcttttccgggtaaccgaacagcgaggtgcagatgatcgattcgccgccgaccttgaagctgcggttggcaaattccatgtcgcgcagcgtctggaacagggcgtcgaaattcacctcgccttcgccgatgccgacgtgctggtgcaccgcggcgtcaacgcccggcgggttgacgatatagcggcagtgcttggtgtggttcatggtgtcggcgatcagcacgtgggacagatcgtccccggcgtactgcagcatcccggctacgtcaccctgccccttgtcgtagtagaaggtgtgcggcacgctgtagaggtatttgacgtggtcgctgcgcagcgacttcaccagatcggcggtttcgttgctcagctcgcagaagtcccacgggtgcgactggatctccatacgaataccctcgcgctcaacgatcggcagcagctcctccatcgagcgataccacagctcctcgcagatctccggttcgttggggttgccggccagctcggtgttgatcacctgcacgcccatttccaccgcgatttcgatcatccgccgccagtttttgaccgccgcctggcggcgatcttcccccggaccggaccagcgatacaccacgataaatgaggagatctccacgccggtcgcttttagggcgtttttatactccgccatgatttcgcggctggccttcggatgtttgtaaaacgggttgatctgcgggtgcggcgactgctcgatgtatttgtagccccagtccgccacctgctgaaccattttggtgacgcccaaatcccggataacgtcgacatcaaaagcgatcttcatggtcactcctctgcaatcgtggttacgcgctgcgagcggttatttaccgtaaaacgccgggcgcgccggcagggtcaccggcacgatctcgccgctgagctgggccgccacgcaggcgtcggcggttaccgcggcggcgtagccgtcccaggcggaaggcccggtcaacttgcccgcggctacgtcgttgatgaagccctgcagctcgacgtcataggcatcgataaagcgatccttccagtcggtcaggatttcggtcgacaggcgggcgccgctgcgcatctgcaccgaggacggttccggcagtttggcgatgccggtttcccccaccacttcgcactgaatgtcgtagccgtactggcagttgacgaagatttcgacgtcgatgcgcgtccctttggcggtttcaaacagcacaatttgcggatctttcaggtgcgggaacgccttcgggctcttgcgtgggaacaccacctgcaccgacacatagtcgtcgtcgagcagccagcgcagcacgtcgatttcgtggatcagggtgtcggtgatcgccatatcggtggtgtaggcctcgccgaccgtcgggttgcggtgcgcgcagtgcagcatcagcggctcgccgatctggccgctggtcagtacctgtttcagcgcgcgatagccctgatcataggggcgcatgaagccgacctgcaccagccgtttgccgtgcttcgcttcggcgtcgacgatgtttttgcagccctgcgcggtcaccgccagcggcttctcgcagaataccggtttgccggcggcgatggccgccagcacgaactcttcatgactcggcccccaggaggtgaccagcaccgcctgcacgtcggcggctttgatcagatcgtggccgttgtcatacacccgcgcatccagctgcagatcgctcaccgctttggcggcgttgtcgcggttgatgtcgttgaccgccaccacgcgggcgccctgcaacactttgctgcagcgacggatatgatcgcggccgatggcgccggtgccgataaccccaatgttcaatgtcattttcgctaccctcgagattaatgtatgaaaacgaatcagtaatcgcgcgccttatcgatgttttcctgcagcttgcgcgccactgcgacgattttttcgctgtcggccacctgagcgccgcccacgcgccaccagctgagatacttgtgcaccatggtcttcggcagcaccttgatgtccagcagcgtggacacggtttgcctgcgggcgtcggccagcgcgtcgagcaactgctgctcggtggtgacgcgataggttttacagccgtaagccgccgccagcatggcgaaatcgaccggcaccagtttgccgtcgagcttgccgccctgtggattgcggaagcggaattcggtggtgtagctgtccatgccgtgttccatctgcaggttgttgatgcagccgttggtcatgttgtcgaacagcaccacgttgatcttgcagccttcctgaatcgaggtgaccagttcggaatgcagcatcatgaaggcgccgtcgcccaccatcgcgtacacctcgcgctggggctcggccagcttgacccccagcgcggcgttcacctcgtaccccatgcaggagtagccgtattccacgtggtaaccgtgctcgccgcggttgtgccacacccgctgcagatcgcccggcaggctgccggcggcggcgacgatcacgctgtccggcggcagctcgcggttcagcacccccagcacccggctttgcgtcatcgccgagccggtctgggcgataaattcgtcgaacacctgctcgcggtcgaggtgatcgtctatctccggcacaaagtctgcgccgctgtattccaccgagtaaacacgctcggtctcttcacgctgggcaccgcgcgccgcggcgatggcgtcgccccagccggcgcgataatcggcctgcgccagcagcgcgcccagtgcgttcagggcctcgcgggcgtccgccagcacctgcacgccgtcgagcttgccggcgtcgaaggcgctgacgttgatattgaggaagctgacgtccgggtgttggaacagccatttggacgaggtggtgaaatcggtgtaacgggtgccgacgccaatcaccagatcggcctgccgggccagcgtgttggccgccaggcagccggtttcgccgatgccaccgaggttgaattcatggtcactcgataccgtgcctttaccggcctgggtctcggcgaacggaatgccgaagcgctcggcgaattcgcgcagcgcccgcccggcctgcgagtacttcacgccgccaccgcacaccagcagcggtttgcgtttggccgtcagcagcgctaaggcgtccgccaacatgccgtcggtcgccgggcggcgatcgagccgatgcacgcgcttttggaagaaatagtcggggtagtcgtaggcttcaccctgcacgtcctgcggcagacacagcgtcaccgcgccggtttccgccggatcggtcaacacgcgcatcgcattgatgcaggcgctcatcagctgttccgggcgcacgatgcgatcccagtatttgctcaccgcacggaacgcgtcgttggtgctgatgctgagatcgtaagactgttcgatttgctgcaacaccgggtccggctggcgggaagcgtaaacgtcgcccggcagcagcaataaaggaatgcggttagcggtggcggtggccgcggcggtgatcatattggcggcgccggggccgaccgatgaggtgcaggcgtaaatttgccggcgcagcttctgtttggcgaagccgatcgccgcatgggccatcccctgctcgttgcggccctggtgcacccgcagatcgccgctatcctgttccagcgcctgccccagccccagcacattgccgtggccgaaaatcgcgaaaatgcccgcgacgaatttggtttccacgccgtcggccagcagatactggttatcgagaaatctgacgagcgcctgcgccatggttaacctgatcttgcccatttacccaccctttagattaagggccgccccggaaagcgctcatgccgagccgacaatcccgtgtttgtgttacgcggcggcagctattatcttgagcaggcgatgcccgcgctgctcacgaagtcgacaacctgaaacgtgaagcgattataaacaaatatatttttcataaaatcacattacagaagaaacatttcattttgcgataaagatcgcatattgcatgaaaagcccgtttcatctcgtggttcagccttcatgggcttcgtgccgcgcaccggccgataaaagtcgttggcacatgggctgacagccttttcctctgccctcacctcccttttatgttccgccccggcggcccttgcgcagccgattcatcgccttttcccacgcctctgtcgatgttttaaacgcatcacatttttggggtgtaaatttcatttcatattgaaattgaaattttcattccccatactgtccccatgcttcctgcagggcgccacgctcgggccgccgccggagttttgcttaacagaaggaaacgggtatggctacacaacaaaaacagcttgatgtcatttgtctcgggcgcatcgccgtcgatttctatgctcagcagatcggcgcgcgtctggaagacgccggcacattcgccaaatacctcggcggctcttccggcaacgtggcctacggcaccgccattcaggggttgaaatccggcatgctggcccgcgtcggcgatgaacacatgggccgctttctgcgtgaagagctgcagcgcgtcggagccgatacccgctgtctgatcaccgacaagcaacgattaaccggcctggtgatcctcggcatcaaggatcaggaaaccttcccgctgatcttctaccgcgaaaactgcgcggacatggcgctgacgccggacgacatcgacgaggcctacatcgcctcctcccgcgcgctggccatcactggcacgcacctgtcgcacccgaacacccgcgccgcggtgctgaaggcgctggagtatgcgcgccgccacggcctgcgcaccgcgctcgacatcgattaccgcccggtactgtgggggctgacgtcgctgggcgacggcgaaacccgctttgtggaatcagaccaggtgacccgcgaactgcaggaggtgctgcaccatttcgatctgatcgtcggcaccgaagaggaatttcatatcgccggcggcagcaccgacacgctgacggcgctgaaaaacgtgcgccggactaccgcggccacgctggtgtgcaagcgcggcgcgcagggctgctcggtgttcgaaggtgaaatcgccgacgactgggcgcaggtgaagctgcacgccggtgtgcgggttgaagtgctgaacgtgctgggggccggcgacgcctttatgtccgggctgctgcgcggctacctgaacgatgagggctgggagcaggcctgccgctacgccaacgcctgcggcgcattggtggtttcgcgccacggctgcgcgccggcgatgccgaccaaacgggaactggacgactacctgcagcgtgaacagcaggtcacgcgcccggaccgcgacgcacgcctgaaccacctgcaccgggtcaccacccgcaagcaacagtggccggaactgtgcgtgttcgccttcgatcaccgcaagcagctggcggacatggcgcgcgaagccggcgtcggcgaggaacgcattccgcgcctgaagaccctgctgctcaccgcggcgcaacaggctgccgcgcaggccggcctcaacggcaacagcggcattctggccgacaccacctatgggcaggcggcgctgaacgagatcactggccagggatggtggatcggccggccggtggagctgcccagctcgcgcccgctgcgcctggagcacggcaatatcggttcgcaattgatcgactggccgcaggagcacgtggtgaagtgcctggtgttttatcacccgcacgatgcggaggaactgcgccgcgaacaggatgagctgatcgccgacgtctaccgcggctgctgtaaatccggccacgagctgctgctggaggtgatcctgccggacagcaacgccgacaaagacgaacgttattacctggagatgattgagcatttctaccagttgggcattcagcccgactggtggaaactgccaccgctgagcgcagaaaactggcggcaggtcggtgccctgatcgacacctacgatcccttctgccgcggcgtgctgatcctggggctcgactccccggaggcggtgctgaaggcgggcttcgccgccgccgcggatgcgcgctgggtgaaaggtttcgccgtcggccgcaccattttcggccaaccttcgcgccgctggctgcagggggaaatcgacgacgcggccctgatcgagcaggtgaaacaaaaatacctgacgctgatcggtttctggcgccagtaccgtccgcaggcgggcggcacgcactgacagcaacagcaggttcacgtccccttaaggccatttcgccgctttaaggggatttttttgccccttttctgtgaagtcgcgcaatgtgcgatcgaataaatcgctttttgaggaaatgaaatttccgctccgtctgttaaaataccctgtcaatatttcaggcatcaggccaatacgccttcaccccactgcgagccgaatggatgaacaacccaactcaactttcgctgttacaggacgagatccgccaccgttatgaaacgctgagcaagcgtttgaagcaggtggcgcgctatattttggataacagtaacagcatcgctttcgataccgttgcctccatcgccgcacaggccagcgtgccgccttccaccctgatccgtttcgccaacgccttcggcttcagcggcttcaacgaaatgaagcaggtgttccgtcagcatctgatggaagaaacggtgaactataccgagcgcgcgcgcctgttccgccaaacctctaccgacgacaacgtcgcgccggagaagccggcggagattctcaacgtattcaccatggtcaatgcgcaggcgctgcagcagctggcgatgcagattgcccccgagcaattggatcgcgccgtcgaactgctcaacaacgccgaaaacatctacgtgatcggcctgcgccgctcgttcagcgtcgcctcctacctcacctatgcgctgcgccatctggagcgccgcgcatttctgatcgacggcctgggcggcatgttcaccgaacagctgagcatggtgaaaccgaaagacgtggtgatcgccataagctattcgccgtacgcccgcgaggcggtggaactggtggaattgggcgccaagcgcggcgcgcagcagatcgccatcaccgacagccaggtcagcccgctggccgcgttcagcgacgtctgtttcgtggtgcgtgaagcgcaggtggacgggttccgttcgcaggtggcctcgatgtgcctggcgcagacgctggcggtctcgctggcgctgaataacgcccgggacgagtaaggcggatgtgaacgcgcccgacaggctcgggcgcggcgggattattgcagcaacaaatagcggtagagcgcgctttccagatcctgcttcatgctgatgaaaagcagaatctccaccgtttggccgtcgtagtcatagatgacgcggtattcgctgtcgggatccaatcgttcgtgcaaccgcactcccatgcccgccagcacggcgttgaagcgatagcggacgggatcgtcggcgattgccgcgagggacgataacaacagattgtccacgaacatcccggctgcgacggcccctatcgttccgctcttataagactcgatgtctttcaggctccattccgccgccggcgcgacggtaaaacgtatttcctggggcatcctgcacctcgggtctatttccgcgcgtcacgcagccgctgcaaggtttcttcgggcgacagaccgcgctgatttttaatctcttgcttcgccatcatagtcagtttcaacaacgcgttggactggcgctcgagattgcgttcccgtatttcggcctctctctcagccgccgtttgtacaaacagctcggcaacaccattttttgtgacgtaaaccccgccttcaaacagatcgggcgaacctaatccttcgcgcgccgctttttgagacatggtggttgtcatagtttttcctcctgtgtaccggcattctcactgcataacagcggttcgttagattcactcagccagggagcaatcgcgtgcggacaggttatcatttgagcaagagagagggcaaatttaggtcaaatttataccctgataaagagaaagcccggcaagccgggcctcaagcgcctattgcgcggcggggtaaccttcgccgttaatccaggcgtggtctttttcccaggtgaacttccactgccgtaccggcccggccatcacgttgagataatagttgtcataacccgccagggtcgccaccgggtgataaccgcgcggcactttcaccacgtcgcgattgtagaccggcatgcactcgtcgagcgtgcgatcgtcggtatagacgcgctgcatgcagaatccctgctccggctgaatgcggtgatagtaggtctcttccagataggtttcgtccggcgagtcttcccgatcgtgcttgtggctcgggtaggagctggtgttgccctcgtcggtgtaaacctccaccaccagcagactgtcggccggctcgctgtccggcagaatgttatgcaccaaccgctggttgcgccccttgccgcgccgctccacgccgatttccgccggcgtgatcaggcgtgaaggcagatggccgctgccgggcgcgctgcacaccgccaactccagatcggtttctgcccgcacgtcgatgcgatcgtggtgcggcacgtacaccgcgtaaggcggcgtgcgctcgaacgggctcatgcgtttgccgatatgcgggtattcggcgcgcagcgtggcgacggaggcgataccggccaccagtaccagacacagttccttgtcaccgcactccagctgcagcgactgcccggcggccaggcggtaaacgtcaaagccgacatagccccaaccggcattttccggcgtcacgtgctggatacgcccctcggcgttcggcgcctgacatttggcaagcagtgaagacatttcgattctcctgttaactccccgtgcaaaggccgctgcccccatggagcaacggcccgctcatactctgcgatcgcttaacccagcgtcggcatgctgaattcagacaccgtctgctgcccggccggccagcgcgcggtggcggtcttcatgcgcgtgtagaaacgcacgccgtcggtgccgtgcacgttcagcgcgccgaacaccgagcgcttccagccgccgaagctgtggaacgccatcggcaccggcaccggcacgttgacgccgaccatcccggcctgcacttcctgcacgaactggcgcgcgtagtggccgctgccggtaaagatggcgctgccgttgccaaactcgtggccgttaaccgtgtcgatggcggtgcgatagtccggcacccgcacgatgcccagcaccggcccgaagatctcttcgcggtagatgcgcatgttcggcttcacatggtcgaacagcgtgccgccgacgtagtagccttcaggatagcccggcacctgataattgcggccgtcggccaccagggtggcgccttcttccacgcccagatcgatgtagcccagcacctttttctggtgagcggacgataccagcggccccatttcattctcttcgccgccctgctgcaagcccggcccgacgcgcagctgcgcgatcagcggcttcagtttggcgatcagtttatcggcggtgtcgtcaccaaccaccacggcgatcggcaacgccatgcagcgctcgccggcagagccgaacgcgccgcccatcagcgcattgaccgtggcgtccagatcggcgtccggcatgacgatcgcctggtttttcgccgcgccgaaggcctgtacccgcttgccgtgcgcgctggcggtggtatagatatgttccgccacggtggaggagccgacgaagctcaccgcctgaatgcgcggatcggtgcacagctgcgccgcatcttcattggcgcagtgcaccacgttgaacacgccgtccggcaggccggcttctttcagcagctccgccaggcgcaccgaggccgaaggcaccagcgccggcggcttgaggataaaggtattgccgcaggccaacgcgatagggaacatccacatcggcaccatcgccgggaagttgaacggggtaatgcccgccaccacgcccagcggctgcatcagcgagaaactgtcgacgccgctgccgacgtccggcgagtattcgcccttgatcagatgcgggatgccgcaggcaaattcgaccacttccatgccgcgcgtcagttcgcccagcgcatccgaatacactttgccgtgttcgctgacgataagctcggccagctcgtcgcggtgctgttccagcagcgccttgaaattgaacatgatgcgcgcgcggcgcagcggcgtggtgcgcgaccagtcggcaaacgcccgatgagccacgtcgatggcctgcttgacttcggcggcggtgctctgcgtgacgcgccgctcaacctgcccgctggccgggttgtgcacgtcgacggtttgattgctgctgctcaggcacacctgcccgtcaataaagttacccacggttttcatgtcacgccctcttttcaagtccgctgtcgcctggccacacccaggcggcgcggcgttaatcgtcccgctcgccaaaccccgtcggcaagccggctaaatcctgaccggatgcagcaaactctatttcattgaaaaaaaagtttcaaataaattgttttgaaaaatttgtttttagtgcgtgaggtcgcaattttgcggtgtcgatcgggttggcgcttgcattgccgtgccagggaaagcgcaactgcggcggagaaagttggggtaatacacactgactttgctacagaaaacccgcactgcgcctgccctgccgccgttaccgcacgccctcgagcgctcaaggtgcccgaatcgctcgcgacggttttttttgaactggatctaaaaatcaatattccattattcactaattatgaaataaatgttcttgtttgttccagcatttatcgacgacatcgccttgatgacaggcacggttcacacccttccgctcgccctcttccctacaccccaaccgtgcggacggaagccaggataaaaatcggagcaacacatgtcatatcagcgtaagcacaataccggctacatattgcgaatttgcggcatcgccgccctgggcggcattctgttcggctacgataccgccgtgatctccggcgcgatcgaagcgttgaaagcctatttcgatctcagcccggccgaaaccggctgggccgtctccaacgtggtgatcggctgcgtggtcggcgccttcgccgccgggccgctggcggcgcgctggggccgtaaaaaggcgctgatgctggcggcgctgctgttcaccgtgtccgccgtcggcgccgcattggctccgaccttcacctggttcgtcatctaccgcatcatcggcgggctggcggtcggcattgccgccaccgtgtcgccgatgtacatgtcggaggtgtcaccgaaagacatgcgcgggcgggcgctcagcatgcagcaattcgccatcgtcttcggccagatcgtgattttctacgtcaacttcaaaatcgccagcctcgccagcgaagcctggctggtggaaatgggctggcgctggatgttcgcctcgggcgtgatcccctgcattctgttctgcatcctggtgttcgtcattcctgaatcgccgcgctggaacgtgatgatgggccgcgacgatcaggcgctggcgatgttgaccaaggtctccaacgccgcccacgcgcagaatctgctgaaagaaatcaaagactcgctgcagcaggatcaacagcagcagcaccggaagctgaactacggcgatgtgcgggtgcggttcatcctgttcgtcggctgcatgatcgccatgttgcagcaggtcaccggcgtcaacgtgatgatgtattacgcgccggtggtgctgaaaaccgtcaccgaaaacgcgcaggaagcgctgttccaaaccatctggatcggcgtgctgcagctggtcggttcggtcatcggcgccatgctgatggatcgcatgggccgcattccgctgatgcgttacggcacgctgggcgccatcgccggcctgctgctcacctcgtatgcgctctacacgcaggccaccggctatttcgcgctgttcggcatgctgttcttcatggtgttttatgcgctgtcctggggcgtcggcgcctgggtgctggtgtcggaaatcttcccgaaccgcatgcgcgcgcaggggatgagcatcgccgtcggctgcatgtgggtcgccaactttgcggtgtcgcagtcgttcccgatgatcaacgaccacccttacctgttctcgcatttccacggcgccttcccgatgtggatctttgccgcctgctgcctgttcagctactggtttatcggccgctatattcctgaaaccaaaggcgtctcgctggaaaaaatggaacaggtggtgctggccaaacgccaccgccaatccctgcccgacggcaagccgctgccgctggaaaacggcaaatcctgatctctcaccccttatcgctggagtcatgccccatgaacattgcgctggaccgcttctgcattaaccgcaagatcgcgccgaatctcgatctggacaattttttccgcctggtgaaacgctgcgggctcagcaaagttgagctgcgcaacgacatgcccagcggcaaggtgaccgacgatctgagcgacgcgcagctcaacgcgctcgccgcgcaatacggcattgaaatcgtcacgatcaacgccctcggcatgttcaatcgggtggatgaccctgcggcgctgcagcagcgcgccgaagcgttgcgggcgcgggcgcaggccatccacagccgggcgctggtgctgtgcccgcactgcagcgccgacgacacgcgcagcgagcagcaaaaacgggacgataccctcgccgcgttgcgtctgctggcgccgctgtttgcccgctacggcgtgcagggatacgtcgagccgctgggcttcggcatcagctcgctgcgatcgtcgctgttgacccaggcgatcatccgcgactcgggcgcgccgtatcgcatcgtgctcgatacgttccaccactatttgagcggtgtggcgcaagccgacttcgacgcgcagatccaggtggcgcagatcggcctggtgcatctgtccggcgtggaggatgggcgggataaaggcgcgctgagcgatgaagagcgcatcatgctgagcacgggcgatcggctggaaagccgccgccaggtacagaacctggaacgcctgggctacaccggcgtctatgccttcgagcccttctcttcgcagttggacggctggagcgaagcggatatcgaacgggaaatccgccagagcatcgccctgctgcaagggtaaaaaaacggcctccgcggaggccgtttttcatggcgttacttcaggttgccgaccaccaactggtggcgcgcattgtaaaacttacggtaagccagatagcaggcgatgatggtcgacaggctggcggtggaaagcagcataaaggtcaccataatctggtatttgatcgctttcaccgggtcgatgccggcaaagatcagcccggacatcatgcccggcaggctgaccagaccaacggttttcgccgagtccacggtcgggatcagcgaagcgcggatgctgtcgcggatcagcgccgccgaggcgaacttgggcgtcgcccccaggctgagcatctcctgaatcttctgctgctcgcttttgaaacgctggccgaggttggtgtagcacaaccccaccgccaccatggcgttgccggcgatcatcccggagatggggatcacctgcatcggcgtaaattcgatggagccggtcaataccagcaccgccaacgtcagcaccgcgccggtggtgatggcgataaacgacgtcacgaacgcgtgttcgacgtacttgctgcgtttcttggcgttgtaagccgcgttaaagcagatgaacagcaccatcaacacggtgagaacgacgttatccaggtcgaaaatatacttcagcacgtagccgacgatgatcaactgcaccaccgcgcggcagatgctccagataatgtccttttccagcgccagcttttcccggtggctgatcaggatggcgaccaccaccagcaccatcgacaagcccaaggattcgttggtgatgttatgctgattcatgctgttgctcctgttgctcggcgccgcgcgcgcgcagggtgatcacctcgtccgcatgcgctatctcttcggtatcgtgcgtcacccacagcaccgccagccggtgttccgccaccagctgatgcactacctcattgacgttgcgtttgttttcctcgtccagcgcgctggtgatctcatcgagcaacagcacccgaggcataaactgcaggttgcggatcagggacacccgctgcttctccccgccggacagttcattgatgcttttggtcagcatcgcctccggcagcccgaaacgcgccagatcggccttcatttttcgctcggccggcggttcctggcggatctggtagggcagcgccagattgtcgtaaaccgtactgccgaacagtgacggcgtctggaagcagtaagagacctgcttgcgatacgcctccggcgacatctcgtcgatcgcctggccgtcgaaatagagctttccgctggtcggatccattaaggaagagatgattttcagcagggtgcttttcccgcagccggaaggtccggtgatcagtttgaactcgccttcacccagcgtgaaagagacggaatccaggatcacctggctgtctatttgataatgaatatcatccaatctcagtatgtctttcttttccttcattacgatgccggctccctatacctgttcccgtctgagcgataagtatatggccgccaaaaacatcttagcaatggctgtgcggatggcagcgaacgaaggggaaggattgacggagcgaaacgccccgccaaatgataaatttaattaatgattagctgtaggaatagtcaaaagcgaccgccagggtcgaatcactctttttttatcgctgcctgttcgtcgcagctgtaccagcggagagaattgttgatgctgcggtgggtgcagtgaaccttaccctccttttccagcgccagcagcagggtgcgggtggtataaatattttcgccgcatttatccgccagctcgcgcgtcttcggccactgctccggcgggggatgatggcccccagatccttccacacgctccctgcacaatccttgcaacacattcagcatcagcgattttctgctttcaaacgttttcggcgccttggccatagcattcctcctgagtggttactgctgagcaccccgctcacggctgcacgtcagcgatgcgcagggtgtaaatcatggtggcattcggggggatcgccggcgggttgccctgtttgccgtacgccagcgccggcggcaccaccagcgtgatcgcaccgtgttgctgcagcttctcgatagccgcgcgaaacagcggcgggtagcgcgtcaacggctgcgagatcaccgtccccgccagctccatgtctttgactacccggccgtcggtcaggctttcgcgcaccacaatatccacccgatcgtcggcgccgatcgccccgctgccggcatagtccacccggtaatagaaaccgagcgcatcctgcttgaccccctcctggcgagcgaaattggccaggtaggcgttgtcatcccgaggcggcgcctgcgtctgttgcgcctgctgcaaccgctgctgcgccgtgtgcagcgcgccgtcgatggcggcttcatcgagccgcaaccgcccggccagggtatcggcgatgcccgccagcaacagctgggtatccgcttccagccccgcgcgccggttctcctgctgcagatgcagaatgtcgcgtccgagcgatacgccggcggcatacgcctgcttgtccgcctcgctggccagcgcaggcggctcggccgcctgctgccgttcggccagcaaggtctccacccgccgctgctgctgcgccagctgcgccgccaaacttgcgctgcgctgttcggcccgcgttaacgaagcggccagcacgctcacttcaggcaccggcgcaacggcctgccgcaatcccttcagggcatcggccagcggccgaatatcgacgacggccggttcccgtttcggcgccgcggcggcctgagccgccgccaactgccgctccagctgacggattttctccgcctgctgttgcaaagagtgctgcaacgacgttaaacgagcgctgtctgcggccggtttggcggctggtgctgacgccgatttacgcgcggtgtcttccctaggcgcggccggtggcgcctgccgctgttcggcaaacttcaacagcgcgggaatgccgtcatcggcggcgcaagcggccccgctcgccgccaacagcaaaagccccatcgcccatccttgcgcgcatcgcttcatggctacagattctcaacccggctggacagatcggacatcagctcatgctcgacgtcagcgcagaatttctcggttttatattgataaagagcatcaatcgctttacgggtactctcatccacgttgccgcgcaccccggcatatcccgaagcgttggaaagcaggccattaaaataggcgatgcgtttttggtaactttgcggattaatattctttaatgaattaacccgctgctgacaaagcgcgatgcgttgctcatcggatttatcattaggattattctgtgagatttttttcacggaattcagttttgtcttgctcccgcccgcacagccagaaagcgccataagagacagcagaaatagggtcaaccccacccaacggcgcccgccgcaagcattaatcatcgttatcattccgtttataatcctttaattgtcacttaggtcatcattatgtggcgaacggcagcagcacatgccttaatttgattaatcaaaatgggttaggtagcaaaaaatccctatcacgcaatgcgatagaataattcactaccggtgcaattgttatttaattgttaaccaattaggtctaaacgctggctaaacgcgaataagaaaccccattccctcatgaacaaacaaccatgaaataacaataaaaacaataaattatgttttatattttgtttctaaagggaaatgcatcatctgctgcctcagagcgatattagcaaaacaatattgtgaattgtaggtgccaccctatttcccccgatctaatatctcgcatatcgttatttatatagtgatttatactggataatatttgtatacgatctattgattttaaagcaaatatatttctttttccttttggttttatattctgaatttgacttaatttaataaaatctatttccaagcaatactattatttgcaagaatattcccagcaacacgccacacgtaaaaaacgtattttatttaccagaaaatccattatcgattttccaaatctcgttatttctcataaataacggatgtcggcgtattgcccagagcaaaaggatctggctccaaccgcacgggcggcgacatggcgttgccaccgccgcgggggatttagatgtgctgttctttttatttaaaaactctctacaggaacctgagaaatgaaactgaataaattaatgctggcaaccgtgattgctttcgcttccgcatctgttgctcatgccgcatctaatcagggcagcggtaaagtcacctttaccggcgaaattatcgatgcgccatgcagcgtcgcgccggaatccgttgaccaaaccgtgccgatgggccagatcagcagccgcatcctggccaaccagggtaaatccagcatgcagcctttcaacatcgaactgaaagattgctccatctccaccatgaaaaacgtcaaagtgacctttaccggcacgcctgatccggttaacaacaaactgctggccctgagcggcacggcaaccggcgccggcatcgtgatctacgacaacctgcactccaaagaggtggaactgggcaccgcgaccgacggtcagggcctgaacgacggcgacaactcgctgaaattcgccgcttatctgcagggcagcagcgcctcaagcgccgtggtgccgggcgacttcaccagcgtggcgaacttcaccctggcttacctgtaataccccacaggggatgtctcagggcatcccccgctttattgcatgccgaggataccggcaagggaacagggaaagacagggagacgccagcatgactatccgcctttgcggcctgttgctcatcgcgctcagcgtcggcagcgcggcggcggcagcgaaaaatcagggccacggcaaagtcagcctgggcggcaccatcgttgaaacgccgtgcggcatcgccagcgacagcctggatcaaaccgtcgattttggtctgatttccatgaccgacgcctcgcaggatgggcagtcggtgctgatcggcagccgccgccatttcacgatcaaactggtgaactgcgagctggccagccaggtgaagcctgacttcatctatcgcgcggccaacgtcacgttcgacggcaccgccgacagcggggatccttccctgctcggcgtttacggcgaggcgcagggcgtggctatcgagctgttgaacgatgccggcacgccgatcccgctcggcagcacgacagcggattaccagatcgtcgccggcgacaacacgctgcgctttggcgcgcagttgcgcctgcatcccgacaaggcgcgggcgggcggcttcagctctctggccaaattcaccctgtcttatctctagcgccggcgggcgctgcacagcattacgtattcaggtcgtacggatgacctgctattgggcgcggacttgccatgagtgattatgctatgacgtcattactgacacggaaacacctacctctcctcgtcattctatctttcctctgggtgcgtccggcattttccgccacggaattcaataccgacgtcctggatatcggcgagcgcagcaaagtggatctttcgcgtttctccgatgccgactacgtcatgcccggcgcttatttgctggacatcaagatcaaccagaaaacgctgccccagcgcagcattcagtatttcccgtcgccggataacaagagcggcagccaggtgtgcctgccgcctgatctggtggaaaaaatggcgttaaaagaagaagcggccaaaaaaatcaccctgtggcacgacaaccagtgcgccgacattcgcggcatcaaaggcgcgaccgtctccgatcgtatcggcggcggcgtgctggcgatcaccatcccgcaggcgtggatgaaatactccgatcccgactggacgccgcccgagcagtgggacgacggcattcccggcctgctgctggactacaacctgagcggccagttaggcaaacagagccacaacaacaacaccgcccagaacctgagcagctacggcaccttgggcgccaacctgggcccctggcgcctgcgcgcggactaccaggccaattacaatcagcaggccggcgatcgcagcaccggtttcgactggaaccagatctacgcctaccgcgcgctgccgatgcaggccgccaagctgacgctgggcgagatctatctcgactccggggtgttcgacgcctatcgcttcaccggcctcaatctggccagcgacgagcgcatgctgccgccgaacctgcagggctacgcgccggaagtgcgcggcatcgccaagagcaacgccaagatcaccgtctcgcaggaaggccgcacgctgtacgaaaccaccgtgcccgccgggccgttcgccatccaggatctcaacagctcggtgcgcggcaagctggacgtcaaggtggaagagcaggacggcaccgtctcgaccttccaggtggataccgccaccattccgtacctgacccgcccgggctacgtgcgctacaacgtggcgctcggcaaaacctcggcctacgaccaccgcacccaggggccgctgttttccgccagcgacttctcctgggggctgagcaacgcctggtcgctgtatggtggcgcgctgctcggcggcgactataacgcctgggcgctcggcctcggccgcgatctgaacgtgttcggcgccatgtcgctggacgtcacccagtcgatcgctcgcctgcccggcgagccgaccgccagcggcatgtcgttcaagctcaactacgccaaacgcttcgacgagctgaacagccagatcactttcgccggctaccgcttctcgcaacgcaaattcatgaacatgtcgcagtatctgcaggagcgctacggcgattacgacaagaattacaacggccgtcagaaagagctgtataccatcaccgccagtaaaacctttatggcggaagacagcgccagggcgatcaccacctatctgacttactcgcaccagacctattgggacgcgcgaacccaggatcgttacgggctgtcgaccagcaagttgttcagcatcggcgatatcagcaacatcaccgcctcgctgtcggcttaccgcacctattaccagggccgcaccgacgacagcgtgatgctcaacttcaccgtaccgatcggcgatcgtcggcgcgtcggctatgcgctgcaaaccaacaacggcgacgtcacgcagaccgcgtcgtacaacgactacagcgatccggacaatacctggcaggtcagcggcggctttaaccagtccggcaaatcgctggcgcgcgggtactacacccacaacgcctcgttcggctcgctgaacgccagcgcctcttaccagcaggacagctactcgtcgatcggcggctcgttccgcggcggtctcaccgcgacccggcacggtatcgcggcgcatcagaactcgagcaacggcggcagccgcatgatgctcgacaccgacggcatcgccggcgtgccgatcaataacggccgcgcctacagcaaccgtttcgggctggcggtgatttccgacatcaccagctactacaacaccgacacccgtatcgacgtcaacaagctggcggacgacgtcgaggccactcgcgccgtggtgcaaggcacgctgaccgaaggcgccatcggctaccgccacttcgaggtggtgaaaggcagcaagctgctggccaccattcgcctcgcggacggcagcgaaccgccgttcggcgccgcggtgctgagcgagaaaggccgcgaggtcgcggtggtcaacgacggcggctcggtctatctgactggcgtacagccggaggaaaaactggatgtcgcctgggaaggccaacgccgctgccgcatcgtgatcccgggcgccgccaagccgctggaccagctgctgctgccgtgcgccaccctgtaatccgtaacgctgagaaataatgacatgaacaaacacccgataacgctactgaccgccgccggcctggccctgagcgccgtactgcccaccgccgacgcggcgatatcgctggatcgcacgcgcgccgtttatgtgagcgacgccaaatcgatcagcctgaatatcgtcaacgaaaacaaagagctgcctttcctggcgcagtcctggctggagaacgagcagcatcagaaaatcacctcgccgctggtggtgctgccgccgttgcagcgcgtggagccgagcgagcgcagcgtggtgcgcatcaccaagacgccggaagcggatcgcctgccgcaggatcgcgagtcggtgttctacttcaacctgcgcgagatcccgccaaaaagcaccaaaaccaacgtgatgcagctggcgctgcagacgcagatcaagctgttctaccggccgaaggcgattgtcgcgcccaagggtgaagtgtggcaggaaaagctggtgttccgtaaaagcggcagcgccatcaccgtcgacaacccgacgccgttttacatcaccctgaccggcatgacgcggcagacgcaaaaacagggcggcggcgcgatcggcggttttcagccgctgatgctgaagccgaaatccagcgaaagcctcaagctgcacgacaccggcatgaacagcttcgtcatcacctacatcaacgactacggcggccatccggagctgcgcttcgtctgcaatggcggcgtttgcaccgccgtgcccgagaaaaaataaggaggtccagcatggctgaattcaccgatcgactgcgccctctgctgctcggcgcactgctgtgcggcggcggcgcgctggcggcaacgccgctgggcgtgatcgaaggcaccaccggcaccgtcagctttcacggcggtctgctcagctctccctgcagcctgacgccggacagccgggatcagtccgtcgatctgggcgacgtcagcgcacgcgacttccgcaacgccggcgatcgcagcgcgccggtgcgttttcgtctctcgttccgcaattgcctgctgggcgcgcgcgcgctggcggataacccggccggcccgcgcaacggcgatgccggccgcctctacctgcagggtgagcaggccgccacgctggtgtttctcggcgaaagcgacgtcgacaacccgtcgctgctgaagctgaacggcggcgtacagggcatcggcctgcggctgcaagaccagcagggccaggcgctggagctgaatcaacgcagccacccctacattctgcagcccggcagcaacaccctgtggttcagcgccagcgtggaatccacccagcgggcggtgatggcggccgggttcgccgccgtggcgcacattcaggtgatttacctgtgaggctcgagaacgcaatgaaaactcaactgaccaaactctgcctgccgctggcgatcgcgctggcggcccccgccgcctgggccaacggctatgtcacgccggacggcgggccgaaacagttctatatcgatctgaatgaaagcaacatcaccaaccaggtggggttcaccaaactgtttccctatgatctgggcggcacctataccggcaaggtgtattgcgatacccctatccccaccagcccgcacttttacaagtcggattcggcgttgcccccctccgactacggcaacggctatttaaagctgaatgactttttggatttaaaagccgaggtgtggattgccggcaacaagaacgcgtacgtcaccgtgcctttttacaacgaatcgaatttgctgagccaacaccgctgccagccgccgtacttgcaggtcaacaactacggcagcggctccaaaggcaagatcaccttccgggtgcgcaaaaaaatcattaacggcgttgagattaacgatcggcagatcatcgagatgtacggccgcctcggctcgaccgacggcggtttcggccccaacccgatggcgcaggtgtttatccagtccgcaatcctctacgtgcccgataaatgcgtggtgaacgaaggccagttgatcaacgtggagttcggcgagatcggcggcagcgatctcaacggctcgaactacccgcaaagcattccggtgcgcttccagtgcgagggcggcagcttcgaggacggcacgctgaatatcaagctggcggtgtcgggcacggcggcctccttcagcaacgaggtattcaaaaccgacaagaacgatctcggcatccggctgacgcataacggccagctggttatcccgaatgagttttacccggtgccgaacatcggcaacggcggctcctggaacctggtggcggcgccgttcgccaacggcggcgcagagatcggcgaaggggaattcaacgcatcggccaccatcgtggcggcattccagtaaccgagggaggaacggaaaatgcgtctacgcgctttagcgctgctgagctgcgcgccctggtggtttgccgccatgccggcggcggcgaacaccgagcttatcggcgcgccggtgcagttccacggcaccgtggtgagccggccgtgcaatatcgaaccgcagtccgccgatcagctggtggagatgggcacggtgatcgtcaaaaccttgtatcgctacggccacaccacgccggtgccgttcagcatcaagctgaccgactgcaagaccacggtgttcaaatccgtcagcgtgaccttcagcggcgccgaagacggagagctgccgggcaagctggcgatcaacaacggcgcgaacggcgccgccatcgccctgtttgatcatcagggtgcggacatctctctgaataaggccaccagcgccgtcgcgctgcaaaacggccccaacaacctgaacttcaccgcctacgtacaagggcggccgagcgcgattcaaaaccaaagcattaccgaaggcgaattcacgtccgtcgccaattttgtgctggcgtaccaataagccccgcaccgccccagggaaatcaggaaaacgcccggcgcgcaatcgccggcaatgggccgtcaccgttcgctccggcgcggccttttaaggaggcacccatgccagatattcgcttcacgctgttcgacagcgataacttctaccagcaggggctgcgtctgctgctgcaggattatctgcactccctgaacgaatgccagcgccggtacccgcagttctcgccgctggcactgcaggcgttggataacatcgaaatcgtgctccgcacgccggaagagcgctggggctgcgcctgctgttaccagagcccctacggcatcccgcgccagcggcagctgactctgctgatcctcgacgacacgacccagcaacaggtgaaaaacctgccgccgctgttcagcatccatcggcgcgattcggcctacgccatccgcctcaagttgcagatggcgctggagaaatttatccagcatccgtggatggcgctgcacgccgccggcatgtggaaatgccaggcctgccgcatcgccgcgctcagccactgcgaaaaaaaagtgttggggttgatgagcagcggcatgtccgcctgcagcatcgccggcctgctgcagcgcagccagaaaaccatcagcgcccataaacgctcggcgatgcgcaagctgaacgtgcgaaaaaacagcgagctgaataaggtgctgttgaatcagcgcgggctgagttgactgacaacggactcgcgagtgccgaaagagtggtttactctgaatactcattttcgcactgcaaagcgagccggaatccatgcccagaacagccaaagtcgttgacgttcccgccctcggcgagctcgatcgccaggcgggtcagcttagccaccagctggcgcaggctctgcgccgggccattcaccggggcgatctgaaagcgggcgatctgctgccctcgacgcgccggctgtcggcggcgctggatctggcgcgcggcacggtgttggaagcctttgctcagctgacggcggaaggctttctcgaaccgcagcccggctccggcacccgggtcgcccactatcaggcgccgcgccgcacgccgcacgccacggcacaggcgagttcggcggtagcggttccgctttcttcacaggcgcagcatctggcgcgctttgccacgcaggcgcgggcgctgccgccggtgccgttcactgtgtcagtgccaatcggcgataccgcgcccgacgatatctggcggcggctcggcaaccgcatccgcgcccgcggccccggcgcgccgtcgggctacggcgatccgctgggcgcactgccgctgcgcgaagccatctgcgactatgtgcgccgttcccgctcggtaaactgtacgccgcagcaaatcctcattacctccggcacccaacaggggctgtatctggccgcgcagatcctgttggacgccggcgacagcgcctgggtcgaagatcctgcctacgccggcattaccgccattttcgatagcctgttccgcgatcggcgcatgattagggtgcccgtcgccgacgacggcatcgacgtcgccgccggcgtgcgcctggccgccaatgcccgcgccgcctttgtcacgccgtcgcatcagtatccgctgggcatgccgatgagcatggcgaaaagaagcgccctgctggcctgggccagagagcggcaagcctggatcgtggaagacgattacgacagcgagatgcgctacgccggccacccgttcccttcgctgcaggggctggcgcccgagcggacgctctatctcggcaccttcagcaaggtgctgttcccttcgctgcggctgggttacgccatcgtgccgccgccgctggtcgacgccttttgcggcgccaggatcctgatggatcgccatccacccagcgcggatcaatacgtgctggccgcctttatcgccgaagggtatctcgaccggcatatccgcaaaatgcgcggcgtctacgccgagaagcgtcgggtgctgatcgaggcgatcaacgcgtacatcccggccgagctggcggtggtgcagccctgcgatcagggcatgcacatggtgctgtggttgagaaaagatctcgacgacctgcgggtcgccctgcaggccaacgaagccgggttggcgctgcgggcggtgtcgccgatgtatgcgcccgaccacggtgagccgggcctggtgctggggttgggcggttacgccgaccgccaggtgcaacaggcggtggaacggctcggacgggtgatcctggcctgcgccggcagcggcgcctagcgggaaaaacgtttggcgccgaacacgcaaaccaccacgccggccatcacggcgatcatcatcggctggacggtctcatgcagcagccagcccgccagcgccaggccgaagaacggctgcagcagctgcaactgcccgacggcggcgatgccgccctgcgccaggccgcgataccagaaaataaacccaatccacatgctgaacaccgagacgtaaaccagcgacagccaggcagcgccgctgaccacgggccaggcggccggtgccgccagccaggtggccgccagcgtcaacggcaaggcgaccaccagcgcccaggagatcgcctgccagccgccgatccggcgcgacagcaccgccccttcggcataacccaggccgcacagcaacaccgccccgaccatcagcgcatccccttgccaggcgccgccgctcccctggctcaacgcgaaagcgcccaccaacacggcgccgacgcctgaaaaagcccaaaaagcgggcttgggccgctctccgccgcgcaaaacgccaaaaccggcggtcgccagcggcagcaggccgatatacaccagcgaatgcgccgacgtggtgtgctgcagcgccagcgccgtcagcagcggaaaaccgatgactacgccaagcgccacaaacagcagcggcggcaaatcggcccgcgtcggccgcgcctgccgggtgatcaacagcgcacacagggccagcaaagcggcgatcgccgccctgaccgccgtcagaaacagcggatcgagctccagcaccgccacccgggtggcgggcaacgagccgctgaagatcatcatgccaagaaaaccgttcatccagccctgggccgaatgcccggcggcgggatgtgcaggggtaacaacgagagtttttgcagactgactgtccgtcatgtgaacgctccgcacgcctgaggcataccgaaatcggcaacccgcgaggcgatgtcatagtgaaagagaacatcgttgcccggcgtcgtttgccggggctgcgttctatttttcagataaagcggttcacagacaggtccagatagtgaaattttcactgtgccggttagcaaagcgcgccgctaacgccaaagaagggcgtttttcgggctgtccttggccgtttggcggccctgcctgcggggtatcatggacttttatgcgtttttgtagaacaggacaaggtgcggcgccgtggtgaaacccttcttacgcagtggcagtttggatgacgtgctggctttaggcgagaacgggcaaccggtctacgcctgcgcgcagcagttgcgggaaaccctgcgccttcgccggcagcagcaggccgccgactgtctggcgatcccccagccgaacgaaagcggcacccgcatcgactggtatgcgcccttccccggcaaagtcacctcctggctggcggcgagcgatgcccagcgcgcgcaggcggtacggcacctggaacactgcctggcgaccttccgcagcctgacggaacaggccctggcgaccgatcaccccagccatcgcctgttcggcgcgctgctggccaaagcgatgcacatacccgaccccaaccacgtttacctggtggacgatcggccggtgctgaccttctggggctttatcaagccgcaggcgcagagcccggacgatccgttggcctgcctgcgtccgatcgaatcggaagtggaaaaaccggcgccgatcgctgccgctccgcgcaaaccggccgttgtcgaaccggtaaagccggccccggccgccgagcctgaaccggtgcccgctccggcggcgcccgtcgaatcccccaccgttgttcgcccacatcggcgccacgcgctgtggctgttgccggtactgctgctaggcagcgcggcgctggccgcctggctgcaccgctcaccgtcgccgcaaccggcgatgccggctgaggtgcgccatccggcgccgccggaaaaaaccgccgcgccgttgcctaagctgcgcttgccgctggcgcacgccacgctgatgccgccgcccccagccccggtcatcccgcagccggcggacaaaaatgcgctggtgctgccgcccgaggcggtgaaggccggctccacccgtttccttaacggcaaatggcgcgccacggtggcgctgaaagatccgattaccggcaagcgccccggtctgcaataccgcctgaacgcaggcaaaggcagcgctgtcatcgcctacggcgacggcgtcagctgccgggtggcggtcgaggccgggctgatgcagtccggcaatctggtgatcaacagccgcaccaaggcgcgctgcagcgacggcagccgctaccagatcccggaaatcgtctgccgccagggcgagaccggggccgcggaatgcaccggccgctacgatgcggacaccacctatcccatgacgttcaagcgcgagagtaaatgatgctggcaccccttacggactacaaacacggcattacgctgattcaggacagcggcattcagtttatggactttgccctgacgccgcggctggacgccgagtttcccggcaaattcgtgcgcaagaccgccagcggcccgctgctgcgcctgcaatgggaggccgagagcggcaaatatcagctgccggccgagggtgggcaagccgccgaagtggtgcggccggagttcagctacccgctgcagcagtcgctgcgcctgctggataagctctggctgccgctgcccttcttgcgccacaccccggcgggcctgtttttgtcgggcccggacaactgggcgcgcctgcaggtggtgcagctggatgaaccggatcaggacggcaacctgctgcgcgtggtgctggccttcgacactcgcaccgccgcgcccggccaggaggcgctggcgccgggcgaaagcgatctcggcgccgatctgagcttcgcgctggcgcaccgcaaccacgagctgggcgaatttctcgatctgacctgggtggacggctggctgcgcgaggcgttcagccagcgcgccgccgagcgggagcagcgcgccgaagtggagatcaacgccgggctgaaaaccttcgagtatcaggcgcactacctcaacctgctgcacatgctcggccaccagctggcggtgccgcagataaaaatggcggcggcgacgctgcagcaaccggcgatcgacgtcgatctggtgctggacgtcggtaactcgcacacctgtggcgtgctggtcgaagaccacccggaagagagcaacggcctgaagcaaacctacgagctgcagctgcgttcgctgtccgaaccgcaccgcgtctacaacgaactgttcgagagccgggtggagttttctcaggccagcttcggcaagccgcatctgtcgttccagagcgggcgcgacgacgccttccagtggccgtccatcacccgcgtcggccgtgaagccgcgcaattggcgcagcgacgcgaagggcatgaaggcaccaccggcatctccagcccgcgccgctatctgtgggacgaagagcgctatgcgcccggctggcgcttcaacgagcggcacgagccgatggccgccgccgcgccgttgaccaccctgatcaacgacgaaggcgtgccgctgtccaccctgccgacggccgaacggctgccggtgttcgccgcccattacagccgcagcgcggtgatgagcctgatgctgagcgagctgttggcgcaggcgctgatgcagatcaacagcatcgcccagcgcagccgcatgccgaacgccgccgccccgcgccgtttacgcgccatcatcctgacgctgccttcggcgatgccgaagccggagcgcgagatcttccgccgccgcatgcaggaagcgatcgggctggtgtggaaagccctcggctggcacccgcaggatgcgccgttcgacggcgcgcacactcgcttcccggcgccgcaggtgcagatcgagtgggacgaagccacctgcggccagatggtctatctgtacaacgaaacccaggtgaacttcgccggccgcaccgacgcctttttcgccgccatggcccggctcgaccggccgttggcgccaggtgagcaggcgggaaaaacgctgcgtatcgcctccatcgacatcggcgggggcaccacggatctggcgatcacgcactattcgctcgacgacggcgtgggcaacaacatcaaaatcaacccgcgcctgctgttccgcgagggctttaaagtcgccggcgacgatatcctgctggacatcatccagcagtttgtcctgcccgccgtgcagcaggcattcgaaaccgccggcgtgagcgccgccccggcgctgatggacaggctgttcggcaacgaagggcgcatggacgggctttccaccctgcgtcagcaggccgcgctgcagatcttcatgcccgccggacgcgcgctgctcggcgcctatgaagaatacgacccgctggacaaccgggcggaaatcgccgccagcctgggcgatctgctgccgcagccgccgacgccgcaggtgctggcgtttatcaacggcgaagtgcagcgcgaagccgacagcaacgccttcgatatcctgcacaccccgctggtgatccgcctggccgatctgcacgccgctttcttgtccgatcgcatcggcatcggccgctgtctgcgcctgctggccgaagtggtggcgctgtatacctgcgacgtactgctgctgaccggccgcccggcgcgcttccccggcgtgcaggcgctgctgcgccatctgcagccgctgcccgccagccgcattctgccgctcgaggggtatcacacccgcagctggtacccgttcaacaaacgcggccgcatcgacaacccgaaatccaccgcagcggtgggcgccatgctgtgcctgctggcgatcgatctgcggctggagagcttttacttcaacgtcggcgatttccagccctactccaccattcgctatctgggcatgctggacggtaacaacatgctggcggacgataacgtctattaccgcgacatcgatctggatcgcgccgatttcgcgctcgatcccgccggcagcttccagctgcgcggcccgctgcgtctggggttccgccaattggacaacgaacgctggccggcctcgccactctatacgctgaccatcaatgatgcccagctggcgcgcaaactggccggcgatgcggtgatcagcctgcggctggccatcaccgccagcgccgagcagggcgccgagagcgtcaagatcgcgcaggcgctgctggccgacggcagccccgtcccggcgcaccacctgcaactgaaactcaataccctggctgccagcgcctccggtgcgacccactactggatagacagcgggagcatttacccacgatgaacacacaaaccttcgccccagcggccccgaataacgcgctcagcgccggcatattgcaggcgatcgactgggtggacgccgcgcgccgccaatcccctcgcctggagcgggaggccgatcgcctgatacagcgtctgcgccgttgccataaccgcgccgcacggttggaaaacacatgccctgcgcaggtcgccatcggtttgtatggccacaacgccgccgccaaggcccatttgctggcggcgctggcgcctggcgcaaagcgcttcaacgcggacctttcgctcgcggtgcgctactgcacggcggccgaggcggggcccgccgagtatccgatcgccctcgccctgctcaatgaagcgcagtggctggccatcacgctcgatgccgccgcgatgggcggcttccggctggactgggacgcccgcgcgatcgccggccatctgcaaacgttggcgcgccaccgccaagccatcgcccccgacgccctcagcgacggcgatgtgctggcgctgtgggatagccaacgccgccacggcgacaagggacaacagacgctggacaggcatttctggccgcaggccgtggcgctggcgccgcagctgagcatcgacgatcgcgcgcgcctgtttgcgccgctgtggggagaggaaccgacgctgacgacgcattatcgccagctggcacacacgctgcatgccctcggtgacagccggcaggttcatgccccgcgccgcgccttgacgctgctgaccgcgagcgccgcaccggaaaacacggcaatcgtcgtgatggccgaacacggcggtgaacgggagatcgcgctgagcgatctggtctggttgaccgccgaagtcaccaccgttctgccgcaaaccgcgcaggcgggcctgcccgccgacgtggcgctgatcgacctgcccggcagctgcgcccgcccgcaggcggaaccgacgcagcggctgcaacaggcgaaacgcgcccatttgctggcccgctgcgcggacggcctgcacgccaacctgctgctggtggccgatgccgccgccacgccgcaggacgccgcgcgcatcggccaggcgctcgccggttgggtcgaccacacccagggggaaaccccggcgctgcgccagcgccgcaaacccggtttaatctgggcgatcacgccgttcgacccacgccaggaaggcaaaccgcgccctgacgacgccgttcagcgccaggtcggcgaacccggtgacagctgggccacactgctggcgctggatgagcaggattgccgccgcatggtgaactacctggccgcacaggcgcgcccggcccacaagcaagcgcgcctgctcgagctgcgcgaagagttgcagcgcgagctgacggaaagcctgctcggcaactggctcaccgccgccgatccatacgcgacccagcaacgcgcccaacagctgctgcgcgcgctgcaggcgcaggccggccgccacggcgaactgctggaacgattgttgccccagcgcgatacgctgcgccaactttaccagcaacagcagcacgccgtgccgaccccggcgacgcctgcgccgttcgggctcgacatcgatctgttcggcgcaccggaaaccccggcgcccggcgagccccccacgtcaccctttgccacgcggatattcgcggattggatcaaccatctgcgcagcctgccggacagccgccggttgctggatctgctcggcgtcgacaaaccgcatctcgaactgctggttgatgcgttgatcggcgccgcctgccgccagcggctcgatgatgagctggagcgcgcgctgtgcgccggcggcctgccggaacagggggaagatcggcagatcagccaggcgttggcgctgttgggcgacttcgtcgcctggctcggcttccagcggcgcgatgcggcaacgcgccccgagagccgcgtcaatcccggccaaccgatctttaccccgccgccgcagccggcggtggactggagcggccagcagcggctcactcggctggcgccgacgccaaccaaaagtaccgcattttatatctatgactggctgatcggcctgcagaccctgctggcggaaaatgccgcgcaggcgcagccggcgctggcagacgagcaacgcgccgacctggcggcgatcgtcgccgccctgcgcgctgcgccgtagcgggcgccatccgggccggacgccgccgcgcagtcagtggcaggccggcccggccgacatcacttcgcggaaatgggtgaccagcgggcgcaggttggccttgtgccacacggcccacagctgcgtggtgtattgcatccagggcagctcgcgcaacaccacgccttgcggcgcgttatgccgcaggctgtgctggatcaacgtcatccccaacccggcggcgaccagccccaacgcagtcagcggctcgcccgcctccagccgaatatccggatcgaacccggccttcacgcaggccgccacgaagtcgtcgcgcgaatgggcatcctctttgtggatcaccgagatccaggcctgatcggtgagatccgccggctgcagcgtttccctgtccgccagcggatgcgtctgcggcagggccagcaacatgcgatcgtccaacacctgcgtatagtccaaatcctgatcgtcgcgatccggcgccgtattgaccagcgccacgtccaggctacgctgccgcagcccttccagctgcatggaagaaggctggctgtaaagcacgatgtgcacatccggccgggacacccgcagcgaccgcaaggcgttcgacaagacgccggagtgcatcgcattttcgatatagccaatgcacagcccgccgtcttccccgcgccccagacggcgcccaagcgactcgagccgggtggcgtgcgtcaacagcgcgcgggtttctgccagaaacgtctggccgtcggcggtcaggcggatgcgctgctgattgcgttcgaacagcatcaatccgaggcgctcctcaagctgggaaatctgccggctcagcggtgactgggaaatgtgcagccgttcggcggcgcggccgacgtgctcttcttccgccaccgccacaaagtatttcaactgacgtaaatcgatcatgtgagacctcaaaggacttaacttagacaaattatgtcctatcaagtcacaacttgccaagttatctttagcctcgtgacggggcagacgctgtatgagccccactagtttccctgaaaagataacgaattgaggattcaccatgagcatcaaaaatattttacccggcaagatcggtttgggcggcgcgccgctcggcaatatgttccgcgccattccagaagaagaagcgctggctaccgtaaccagcgcctgggacttgggcatccgctacttcgacaccgcaccgctttacggttccggcctgtcggaaattcgcatgggcgaagcgctctctcagtacccacgcgatgagttcgtgctgagcaccaaagtgggccgcatcatgctggacgaaatggaagatcccgccgctcgcgatctgggtgagaaaggcggcctgttcgaacacggtttgaaaaacaagatcctgaacgactactcggaagacggcacgcttcgctccattgaacacagcctgaagcgtcttaaaaccgaccgtctggatatcgtctggatccacgacgtcgctcaggatttctacggcgacagctggctggaacagttcaatatcgcccgtaccggcgccttccgcgcactgtcccgcctgcgtgacgaaggcgtgatcaaagcctggggcctcggggtcaaccgcgtcgagccttgcgaactgacgctggcgcttgatgagccgaaaccggatgccttcctgctggccggccgctacagcctgctggatcacgaacgcgccctgcaacgcctgatgccggaagcgctggaacagaatgtcgatatcgtcgtcggcggcccatacagctccggcgtgctggccggcggcgaacatttcgaatatcagaaagcgtccccggctattcgccagcaagtcgcgaaaatcaaagagatcgccgctcgcttccaggtagacgtcaaagccgctgcgctgcaattcgcgctggctaacccggccgtcgccgccgtgatccccggttcgagccgtcctggccgcatggccgaagatctggctgcgctggatgcagtgatcccggctgagttctgggcggagatgcgccgtcagaaactggtggccgacaacgcgccgctgccgattcgttaagttttatggggccgcaccccggccccattacccacatgacagagtgatatacatgatgaaactggatctttcaggcaaagtcgccgtcgtcagcggctccacctccggcatcggtctcggcatcgcgcgcgggcttgccaaaacgggcgccaccgtggtgatcgtcggccgtcagaaagccggggtcgataacgccatcgccgacatcagcgccaacgtgcccggcgcgcaggtacgcggcgtggtcgccgatctcggcaccgaacaaggggctgcaaccctgttcgccgcggagcctaaagccgacgtgctggtcaacaacctcggtattttcaacgataaagacttctttaccgtgcccgacagcgagtggatgcacttctataacgtcaacgtcctctcgggcgtgcgtctggcgcgccactacgcgcagagcatgaccgaacagggctggggacgcattattttcgtgtcgtccgaatccggcgtcgccatcccggcggatatgatcaactacggcgtgaccaaaagcgccaacctagcggtatctcacggcctggcgaaacgcctcgccggcaccggcgtgacggtcaacgccatcctgccagggccaacctttaccgaaggcctgcaggagatgctggcggaagcggcggccaaatccgggcgcagcgcgcgcgatcaggccgacgagttcgtaaaaaccgaacgcccaagctccatcattcaacgcgcggcggacgtcgatgaagtggccaacctggccgtttaccttgcgtctccgctgtcttcggccactaccggcgcggcgctgcgcgtcgacggcggcgtcgtcgacaccctggcaatgtaattccgtaccctaaaccgatatcaagagagaaagaaaatggctactacatccgtatctatgaacatcccggcatccgccgataccgtatggcaactgatcggcggcttcgacgccctgcctgactggctgccgttcattccgaaaagcgtcgtttctgaaggcggccgcgtgcgcactttgacgacctctgacggcggcaccgttatcgagcggctggaagcgttcgacaaccgtcaacgcagctacagctactccatcatgcaggcgccgttcccggtggtgaattacctgtccaccctgtcggtacacaccaccgacgacgccaacgtggcgcgcgtggagtggtcgggcagcttcacgccggtcaatatcagcgacgacgaagccgtcgccctgttccatggcatctaccaggatggcctggatgcgctgagcggcaacttcccgcgctaatgcgtgaacactccgcacgcttatggccgatggtgaaaaccatcggccatttttttgctttagctctggagcaggataaatccgccagcgccgtttatgctgtaaaggagacttccgtttgaggagatggccgtgcgccctttcagcctgaagactatcgaccatgtggtgctgcgcgtgcgcgatatgcagaaaagcctgcatttttatacccggatcgtcggctgtgatatcgccaaacagcggccggatttggggctgatgcacctgcgcgccggagcggccatgatcgatctggtggatattaacggcgtgttggggaaaaaaggcggcacggcgcccgatcctcaccggcaaaatgtcgatcacatctgcctgcgcatcgatcctttcaacgaggacgagctgttagcctatctgcgatcgcaggggatcggcgttgatcccgccgaatcgcgctatggcgctgaaggcgacggcccgtccatttatttcagcgatccggacggcaatcgcgtggaattgaaggggccggcgatcggctagatcctggcgctcccgttgatgtcggacagccgttggcgatccgtcacccgcagtgatttgtttttaaattgaatgatgccgtccgccgcgagctgcgccagcgcgcggctcagctgtctgacggagatgcccaatctcgccgccagcgcctcccggttttccagctcaatcaattccccttcgttctttatcttgaataataaaaattttcgcagtttatactccgccgtaaaaacgccgttcgcatgcagcaaagaggcattcagcagcttattgctcaattgccggcagataaaggtgaggaacgccgggtcgctcagggcgtgattgttgatggcctctatcggtgccgcgaggagcagcgcgtcggtcaccgcctgcacggtgctgaacaacgtgcgctgcgcctgggagaacagctccagatcgccaatcaccgagaaatccgtttcgaaggaaaagacaatgtgcgcgccattcacatcaaaattctcaatctgcaattttccctgcacgagaaaaaacaggtgggtcaaacgatcgctttgcgtcaccaggtattcgccggcttcgacgctgaccaggcgcagtgcggcgagcagcgtgggcgaaagcgccgttcgcagatcgtgagcgtcgataaaagcttcttttagcttgctgtcaccgaccgttttcaaggcgattcactcccagggctcatccttaaacgtcttacatcctcgctttcgactgcgttcagcatagccgacgcgcttcagaacgaaaaaggacatctgaccttttttgccttaggtcgtctgggtactttctccgcatagcccacccgaggagatggccatgcgacatattttgatagataccgatactgcttccgacgatgccgtcgcgctgctgatggcgttgcgcgcacccgacgtgaaggtggaagcgatcaccaccgtcgcgggaaactgcccgcttgaacagtgcgtcaaaaatgcacttatctgcgtggaaaaagcgggaacctatgcgcccccggtttatgccggcatggcgaaaccgcttttgcgaacgcgttatcattcgcaccatattcacggcgaagacggcatgggcgacatggccttgcccgatccgcgccagagcgccgaacccgttcatgccgtggacgccatcatcgactgcgccgcacggctcaatggcgagctggaaatcgtcaccctcgggccgttgaccaatctcgcgatggcggtgctgaaagcgcccacgctggccgaaaaagtgaagagggtttatgtgatgggcggttccgggctgatgcccggcaatatcaccccgctggccgaatttaatttttatgccgatgccgaggccgcgcatctggtgctcactgccgggctgccgctcaccctcgttggctgggagatcggcatgggggaagcatttatcaacgaacgcgatatagagcgattgaataatctcggcgaactggggcgctttgccgtgcgctgcaatcgcacgctgatggcgttcaacgccatgcgcaccgaacgtaaaggctttgatttgcccgatccgaccaccatggcggtggcgctctacccggacatcgtcgaaaccagtctggaggcgtattcctgggttgaatataaaagtgaaaggtcttacggccattacgtcatcgattccacccacctgaccggcgaaccggccaatgcgtgcgtgatcacccgcatcaaacccggcctgtttaaagaaaaactgttttcgttgttatctcagccgttaatgaaataagtggcccgtatgaaattcgatccaagaaaattgaagaaagtggaattacacgtccatttggatacctgtttaagctaccactatgtcaaaaaggtcgacccgcaaataaccagagcggcatttaatcggcaatttatcgcgccgaagcgatgcgccgatctggggaactttttaagcaagatagcgccgcaaatagatctattacagacacgccaggcgataacgctggccgtcgaggacttattcgcgcagttggcggcggataatgtcatctatgccgagctgcgcttcgcgccgctgctgcatacccggctgggattaaccggcgaagcggtggtcgagacggtgctggcggccatgcatcacgcatcacgggcttacggcatcgccgccgggctgatcctgtgtacgctgcgacatttcgacgcggccgccagcctgcaaacggcgaaactggttatcgattatcagggaagcggcgtggtggcgctggatttggccgccgatgaagcgcgttacccgctgacccaccatgtggcggcctttcgcgccgtgcgagcagccggcggcaacgtcatcgcccacgccggtgaggcgaagggcgccgacagcgtacgggaaacgctggagcagctacaggtgtcgcgcatcggccacggcgtcagaagcatcgaggatgctgcccttatcgagcgtctgatagccaccggcgtcctgctcgagatctgccccagctgcaatctcgtctgcaatctgttcgacagcatcgacgatcatccgatagatcggctgaaaaggatgggagtgcggctgaacgtgaataccgatgcgcgcaccgtcgccgacaccacgctgaacaaggagtatcagctgttgcatgacgccttcggctggcaggatgacgattttaaccgcagcaaccgacaggcgctggaggcgagttttctcgacggcaacactaaaatgaaattaatgaatcagctcaaggccgggccaatgtgacccggcgcatgtcaaggctgcgcgggttttaacgcccctgcgccgccagcgcctgggcgcaggcccaggccgaactccaggcccactggaagttgtagccacccagccacccggtcacgtccaccacttcgccgatgaaatagagccccggcaccttgtgggcctccatcgtcttggaagaaagttcgttggtgtcaacgccgccgagcgtcacttccgccgtgcggtagccttcggtgccgttcggctgcacgcgccagttctgcaacagatccaccagcgccgcttgttgcggcgcattcagctgcttcagcgtcgcctccggcagttgtcccagggtctgcaagcactccaccagccgcttcggcaaatgcagcgccagggtgtttttcaggctttggttcgggtgctcttggcgttggttatccaggaagcccgccagatccagctcaggaagtaagttaacgctcacatactcacccggctgccagtagctggacagctgcaataccgccgggccggagagaccgcgatgggtgaacaggatgctttcacggaagctgacgccgttctcggcggtgatcaccgccggcaccgacacgccggacagcgcctgcacatgctccagcagcggcttatgcagggtaaaaggcaccagcccggcgcgcgtcggcagcaccctgaggccgaactgctccgccagtttgtaaccgaacggcgaggcgcccaaccccggcatggataatccgccgctggccaccacaagtgagcgggcacttactttttcgccattgagcgccagctggtagccgttctcggttttctccacgcccagcacttcgctgcgcaggcgcatcgtcacctggcccagctcgcactctttgaccagcagatccaccacctgctgcgccgaatcgtcgcagaacagctgccccagcgttttttcatggtaggcgatgccgtagcggttgatcagatcgatgaagtcccactgggtgtagcgcgccagcgccgacttgcagaagtgcgggttgttcgacagataggccgccggttcggcgtacatgttggtaaagttgcagcgcccgccgccggacatcaggatcttgcggcccggttttttgccgttgtcgagcagcaacacgcggcaaccgagttgccccgcctgcgcggcgcaaaacatgccggcggcacccgccccaatcactacgacatcaaactgttccacctgagcctcacttatcaaaaccacaatcgcgacaaaagagcgccatattacgccgtttcgccgccggtcaccgccaaattcacggcggcagattgtaaagccccggcgccgccaacgccacagtaagaaaatattacagaggtcagaggagaataacgcgttgatattcaatatttttgttataggcgcgtcatcgtttcgtcatgtccaaatcaaaaaaacgtcatattttccttttccccggccccggttgtcactgataatgcgcggcgttcatgtccacaaactggcgtaacgcttatgctgcatttgttcgctggcctggatttccataccggcctgatgttaattctcgcattgttgttcgtgttgttttatgaagccatcaacggttttcatgatacggccaatgcggtcgctacagttatttatacccgcgccatgcgctcgcaacttgcggtcgtgatggcaggtttgttcaactttcttggcgtaatgctcggcggtttgagtgttgcttacgccatcgtccacttgctgcctaccgatctgttgttgaacgtcagttcagcacacggattagccatggtcttctccatgctgttggcggcaatcatctggaacctcggcacctggtatttcggtctgccggcctccagttcccatacgctgataggcgcaatcatcggtgtcggtttaaccaacgccctgatgacccacacttcggtggtggatgcgcttaacgtcccgaaaatgattggcattttcctttctctgctgttctcgccgctggtcggcatgatggtggcgggagtgatggtgttcgccttgcgccgctattggagtggcaccaagaaacgccagcgtatccacatgacccctgcggaacgtgaaaaggtcgacggcaaacgcaagccgccgttctggacccgtatcgcgctgatcctgtcggcgattggcgtcagcttctcgcacggcgccaacgacggccagaaaggcatcggccttatcatgctggtgttgatcggcgttgcgccggccggcttcgtggtcaatatgaatgcaaccggttatgacatcacccgtacgcgtgacgccgtgacccacctgcagcaatattaccagcagcacggcgacgcgctgtcgcatgcggtgtcgctgacgccgctggtgccaagcccggatgacgaagctgcgtctggcaaaccggccgagttccactgtgacagttcgcgcgccatgccggcgatcgagctggctcagggcatgctgaccaacctgcaaagctacgatcagctgacggttgaccagcgcagccacctgcgccgcctgctgatgtgcgtgaccgacacggcggataaagtcgccaagctgccggaaacctcatccgccgaccagcgcttcctgaagaacctgcgtcaggatctgctgcagaccgtcgagtacgcgccgatgtggatcatcgtcgccgtcgcgctggcgctgtcgctcggtaccatggtgggctggaaacgcgtggccaccaccatcggcgagaagatcggcaagaaaggcatgacctacgcccagggcgtatcggcccagatgaccgcggcgctgtcgatcggcgtggcgagctataccggcatgccggtctccaccacccacgtcctctcttcggcggttgccgggacgatgatcgtggacggcggcggcgtgcagagcaaaaccgtgaagaacatcctgttggcctgggtactgaccctgccaatctcgattctgctttccggtgcgctgtattggattgcgttgaagctgatctaagcgataagcatcatgaggaaggcggccgcagggccgccttttttttgcctgcatcaagggaaacagaaaggcattaataccaaatcatcatcgctatcaggcagatgaccaccaggccgcacagggccgaggtcagcataaactgcccgcgcacccgctcacagcggcgaataaactccggatcgtggtgttcgacatagcgctgcgcaaagatatagcgcaccagcctcagctgcttgctgggttggccgtgggcggtgaagaagccgccgccgtcgacgtattggtacagcagcgggtcacagccgcgcaataccaccagcagcgcgcgcagagaagagtaataccgcaccatgtttaccacacacaccacacataaggcccaaaacagcgcgacggtactgatcatgattgccccctcaaggcgttgttatccgcggccatccgccgggtccaaccgccctacctcattacccgatactctgctggagcttaccgctctcatcccctttttttgcctgcacgggccacgcccataacccaccgcctccgaagacgttgccgcaccgcacgatgagatttgcacggcatggttctactcagaggagaaatgatgaggcccatatccatcattgtaggttaatgaaacgcaaactggcctgagcagtggataaaatttaccgccctgtaccgaaaagtcacctgccggggcgttataagcgataaccgtccgtttcgattatgtcgcttttctggatagtctatcccgcgccacgccgctgatctttccccccacgctggctagactcaggtttccgttacgctcatccaaggaaactgttatggcaaaccattcaatcaagggaaaaaccgtcctcatcgccggcggcgccaaaaacctcggcgggctgatcgcgcgcgatttggctgaacaaggcgccaaagcggtggtgatccactacaacagcgccgcttccaaagccgaagcggagaaaaccgtcgccgccattcaggccgccggggcgcaaggtgtcgcgctgcaggccgatctgaccaccgcaggcgcggtcgagaagctgttcgccgatgcggtcgccgccgtcggcaagccggatatcgccatcaataccgtcggcaaggtgctgaaaaagccgctgatcgacatcagcgaagccgagtacgacgagatgacggcggtcaacgccaaaaccgcgttcttcttcctgaaagaagcgggtaagcaccttaacgacaacggcaaaatctgcacgctggtcacctcgctgctcggcgccttcacgccgttctacgccgcttacgccggcaccaaagcgccggtggagcacttcacccgcgccgccgccaaggagttcggcgagcgcggcatctccgtgacggcggtcggccccggcccgatggataccccgttcttctacccggcagagggtgcggacgccgtggcctaccacaaaacggcggcggcgctgtcgccgttcagccaaaccggcctgaccgatatcgaagacgtggtgccgttcatccgccatctggtcagcgacggctggtgggtaaccggccaaaccatcctgatcaacggcggctacaccaccaaatagttcgacgggggcagagaggcccccgcacctgctcgcacgcaaccgcgccatgcggctacactctactgtcagaaacggcgccaaggaacagcagatcagcgagatggacagattcaatcaataccgcgtattcgtacaggtggcggaaatgggcagctttatccgagcggcccatgcgctggaggtgccgcgcgcctcggtctccgccgccgtgcagcaattggaaacgcagctgggcgtgcgcctgctgcaccgcaccacgcggcaggtgcggctgaccgccgacggcgaacagctgctcgagcggctgcgcccgctgctggccgaagtggaagacatcgatcagtcatttcaggccagccaacggcaggcctccggacggctcagcgtcgacgtgccgagccgcatcgcccgccggctgatcgctccggcgctgcccggcttgctgcggcgccatcctcacctgcagctggtgctcggctccgccgatcgcgccatcgatctggtgcaggagggggtcgactgcgcggtgcgcgtcggcgatctgcacgacagcagcctggtgatgcgcccgctcggccatatcgcgctgatcaactgcgccagccccgcctacctgagcgaattcggtcatccgctccaccccggcgatcttgccgaggggcactggagcatcggctacgcctcacccaggaccggccgcgaatccccctgggaatacctgaccggcgacggccatacgcaacggctcgaactacccagccgggtggtggtcaacaacgccgaaagctatatcgcctgctgccgcgccgggctggggctgatgcaaatcccgcgctacgacgtacaacacctgctcgacgccggtgaactggtggaagtcctgcccggttaccgcgccgcctccatgccgatcgccctgatctacccccatcgccgccagcgttcccgccgtttggcggtgtttcatgagtggtttgaaagcctgttgcagccgcatctggagcgctgattgcacatttagcgctatactttgtttaataacgcttataattcaagcggtcagaccgttaaaacccgcataacccataggcttttacgccacgcgggtgtacaacaaaaggtatcgtgcgcagagattttcgatgcggcgcagtgtgatcgccccaacatatcattgcgttatccgaatgatactatggaaccaacagcgccaggcgggtacacggaacgcctgctaaccctttttaatcggcatgtttatggaaggagtattcttatggcttacaaacacatattgatcgcggtagacctatccccggaaagcaagatcctggtagaaaaagccgtctctatggcgcggccgtataacgccaaagtttctctgatccacgtcgatgtcaactattccgatctctataccggccttatcgacgtcaatctcggcgacatgcaaaagcgcatctctgaagaaacccaccaggcactgaccgagctgtcgcaaaacgccggctaccctatcaccgagaccctgagcggcagtggcgatctggcgcaggtgctggtggacgccatcaagaaatacgacatggatctggtgctgtgcggccaccaccaggacttctggagcaaactgatgtcttccgctcgccagctgatcaataccgtgcacatcgatatgctgatcgtgccgctgcgcgatgaagaagacgaataaagtaagcgcttgctaacttaactaaccaacgcccgcgccctgcgggcgtttttcatgccgccacgccgattaatcgcttgataatcaaccgccctccgatgatatagtcgctaaagacacaacatcctcccccgagcatcacctatacccaaatctataagaaatagcgggggaaatttaatgcgaaaaggagttatccatggaatatgccgtatcggtagagtctttcctgtcctcgttacaacgccataacccccaccagccggaatatctgcaggcggtgcgcgaagtgttcacctcgctgtggccgtttatcgagcgcaacccgcgctatcgcgaacaggcgctgctggagcgcctggtggagcccgagcgcgtcattcagttccgcgtcagctgggtggacgatcgcggccaggtgcaggtcaaccgcgccttccgcgtgcagttcaactcggccatcggcccctacaagggcggcatgcgcttccacccgtcggtaaacctgtcgatcctgaagttcctcggctttgagcagaccttcaagaatgcgctgaccaccctgccgatgggcggcggcaaaggcggctccgatttcgatcccaagggcaaaagccagggcgagatcatgcgcttctgccaggcgctgatgaccgagctgtatcgccacttgggcccggacaccgacgtgccggccggcgacatcggcgtcggcggccgtgaagtcggctttatggccggcatgatgaaaaaactgtccaacaacaccgcctgcgtgtttaccggcaagggcctctccttcggcggcagcctgatccgccccgaggcgaccggctacggcctggtgtactttaccgacgccatgctgcagcgccacggcctgggctttgagggcatgcgggtggcggtatccggctccggcaacgtggcgcagtacaccatcgagaaagcgctggagctggacgcacgcgtgatcaccgtatcggattccggcggcactctggtggacgaagacggcttcaccaccgagaagctggcgcacctggcggagatcaaaaaccagcgctacggccgggtggcggactacgcccgcgaacgcggcctgacctacctggcgggccagcagccgtggaacgtgccggtggatatcgccctgccgtgcgccacccagaacgagctggatctcgaggcggcgcagacgctgatccgcaacggggtgaaagcggtggcggaaggagccaacatgccgaccaccatccaggccaccgacgccttcctcgacgccggggtgctgttcgcgcccggcaaggcggccaacgccggcggcgtggccacctcggggctggagatggcgcaaaacgccgcgcgcatcggctggcgggcggaaaaagtggatgtacgtttacaacatatcatggcggatattcaccatgcctgcgtggaatacggcggcgagggcaagcaaacccactatgtgcacggcgcgaatatcgccggtttcgtcaaggttgcagaggcgatgctggcccagggcgtgctgtaatcgggcgcaaaggtgatcttgttcacacatcggttaaatgcttcaatgccggcctctgcgccggcatttttttccgcgtccaagccatcaaaatgatgcgcacacgttaattaaaagttaataaaaagttatttacagccgtttggttggtagtaaatttaccaccgccaaataattaaacatttatttaacactaaatacgccaatattttacttaaatgtgcgcagatcacatttcgttaacttcggctacgccccctcttccattcctttgtaatctgcagcggtggaaaaaccgccacccctacagataaaaaaaggtacagctaatgaaatttaacctcgcattattaaatgcatgtgtggtttctgcgtgcatgttatcgacaacacctgtgttcgccgctgataaatatgagattgccgtggtcgccaaagtgaccggcattccatggttcaaccgcatggaagtgggcgtcaacgaagcggcgaaaaaactcgacgtcaacgcttaccagaccggcccgtctacgccggatccggccgcgcaggtcaaggtgattgaggatctgatcgccaagaacgtcaacgccatcatcgtggtgccgaacgacgccaaggtgctggagccggtgctgaaaaaagcgcgtgacaaaggcatcgtggtgctgacccatgaatccccggaccaacagatcggccagtgggacatcgagaccatcgacagcgagaaatacgcgcagaccaacgtcgatgaactggcgaaagacatgggcggcaaaggcggctacgcgatctacgtcggctcgctgaccgtgccgctgcacaacgcctgggccgattccgccatcaagtaccagaaagaaaaatacccggacatgtttgaagtcacctcgcgcttgccggtggcggaaagcatcgacaaatcctatgccaccacgctggatctgatgaaaacctatccgcagatgaagggcatcatcggctttggttcgctcggcccgatcggcgccggccaggcggtggccaagaagcgcgccaaggacaaaatcgcggtggtgggcatcgccatgccggcgcaggccgccccttacctgatgcgcggcgacatcaagaaagcgctgctgtgggatccgaaagacgccggttatgcgctggtgacggtggccgatcagctgctgcagggcaaggacgtgaacaaagacctgtcgatcgaggggttgggtaaggccgacgtcgatatggagcacaaagtgattcggtttaataagattctggaagtcaccaaagacaacgccaaatcgcttggattctgatttttcgcgtaatttcgctacaccgggaaagtagttaaaccctcgtaggggcgcagcctgctgcgcccagggcttcggccgctacgcaagcacaggttaacgttatgacagcctcccccgcatttatcaccctggagaatatcagcaagcgattcccaggcgtgctggcattagaccagatcaacctgacgctgaataaaggcgaagtgcactgcctggccgggcaaaacggctgcggcaaaagcaccattattaaaatcatctccggcgtctatcagccggaaaaaggcgccaatatttcgctggaaggcaaactcttccacgccctgacgccgcagctgtccggttattacggcatacaggtgatctaccaggacctgtcgctgttccctaacctgacggtggcggaaaacatcgccatccaccgttacctgcccggcggccacttctgggtgcgcaagcgggtgatgcgccagacggcgctggacgccatggcgcgggtcggcgtacacatcgatcccgataaaaaagtagaaaaactgtcgatcgccgatcggcagctggtggcgatttgccgcgccatcgccgccgaagcgcggttggttatcatggacgaaccgaccgcctcgctgacccgccaggaggtcgacggcctgctgcgggtggtcaacgaattgaaagcagccggcatctgcgtggtgttcgtcagccaccgattggatgaagtgatggaagtcgccgatcgcatcagcgtgatgcgcgacggcaagctggtgggcacctggccggccagcgaactggacagccatgaactggccttcctgatgaccggccaacgcttccactacagcccgctgccgccgctgccgccggccgaacaggcgccgctgctcgaggtgcgcaacctcagccgcggcgaaaaataccgcaacgtcaatctggcgctgcgcggcggcgagatcgtctcgatcgtcggcctgctcggcgccggccgcaccgaactgtgcctcagcctgttcggcatgacgcggccggacagcggcgagatccgcatcgagggccaagcggtgcagctgcacaacaaccgcgaagcggtgcgccacggcatcggttatgtgtcggaggatcgtctgacgcagggattgatcatggagcaatcgatctacgacaacaccatcgtcaccgtcttcgatcggctgcatacctcgcttggattgctggatcacgccaaggcgaccgagctggtcaaccggctgatccgcgatctgaacatcaaggtgtccgacagcgcattgccggtgaagaccctgtccggcggcaacgcccagcgcatcgccatcgccaaatgggtcgcaacccagccgaagatcctgatcctcgactcacccaccgtcggcgtcgacatcgccaacaaagaggggatctatcagatcgcccgcgatctggcgcagctgggcatggcggtgctgatgatctgcgacgagatcccggaagcctattacaacagccatcgggtgatggtgatgcgcaagggcgagctgatcgccgaattcgcgccgcaccagagtaccgaacaacagatcgccgaggtggtgaatggataagtcattattggcccgcctggccgggcggcacgagttttatctcggcctgctggtgctgctgctggcgatcggcctgagcgccggcaccgatgagtttctgacgctcggcaacctgaccgacgtcgccaccagctacgccattctcggcatcctggcctgcgggctgttcgtggtgctgatcgccggcggcatcgacatttcgttcccggcggtcaccgccatcgcgcagtatgtgatggccagctgggtgatccagcacggcggcagcttcccgctggcgttcgccctggcgattggcgtcggcctgctgctcgggttggtgaacggtttcctggtgtattggctcaaggtgccggcgatcatcatcaccatcgctaccctaaacctgttctacggcctgctggtgtacgccaccaacggtacctggctgtacggcttcccggactggttcatgaacggcatcaactggttctcgttccagggcgccgacggctacgactacggtctgacgctgccgctgctgtgcctgctggcgaccatcgtcgtcaccggcgtgctgatgaaccgcacccggctggggcgccagatctacgccatgggcggcaaccgcgacgcggcgtcgcgcctggggttgaacctgctgcggctgcacttctgcgtctacggctatatgggcattctggccggcgtcgcggcggtggtgcaggcgcagatcacccagtcggtggcgcccaactcgctgctcggcttcgagctgacggtattggcggcggtggtgctgggcggcaccagcatgagcggcggccgcggatcgttgaccggcaccctgctcggcgtggtgctgctggccttcctgcaaaacgggctgacgctgctcagcgtctcggcctattggcaccaggtattcagcggcgcgatcattttgatcagcatcagcaccaccgcctggaacgaaaaacgcaagctgctcaaggagatctgacatgacgcagttaactcggttgatcccaaacgatcggatcattcgcctgcagggcgcgatcatcatcgcggtggcgctgctgttcgccgggctgctcggatcgcgcttcttcagcctcggcaacttccagtcgatcgcctcgcagctgccgatcctcggcctgctggcgctcggcatgggcataaccatgctgaccggcggcatcaacctgtcgatcatcgccggcgccaacgcctgttcgctggtgatggcggcgatcatcgtcagccatcccgaccagcctctgttcctggcgctggcgctgttggccggcctgttggtggcggtggcgatcggcgcgctcaacggcgtgctggtagcctggatcggcgtttcgccgatcctcgcctcgctcggcaccatgacgctgatcaccggcctgaatattctgctgtccaacggcgcggtgatctccggcttcccggcggcgattcaatttctcggcaacggcgccgtgctcggcgtaccggtggcgctgatcctgttcctgctggtggcggtcggtctgtggctgctgctggagcacaccacgctggggcgcagcctgtacctgatcggctccaacgagcaggccacccgctttagcggcgtgaacaccgcgcgggtgcagatcgcggtgtacatcctgtcggcgctgctcggctggggcgccgcgctgctgatgatggccaagttcaactcggccaaggccggctacggcgaatcttatctgctggtgaccattctggcctcggtgctgggcggcatcaacccggacggcggtttcggccgcattctggggctggtgctggcgctgatcgtgctgcaaatgttggaaagcggcctcaatttgctgggggtcagcagctacctgaccatggccctgtggggcggcgtgctgatcctgtttatcgcgttacagaatcgaaaagcttaggagaaaacagataatggcgagctattttattggcgtagatgtgggcaccggaagcgcgcgcgcaggcgtattcgatctcaatgggcgcatggtcggccaggccagccgggccatcgatctgtaccggccaaaggcggatttcgtcgagcagtcgtcggataacatctggcaggcggtgtgcaatgcggtgcgcgacgcggtcaaccaggccgacatcaacccgatccaggtcaaggggttgggcttcgacgccacctgttcgctggtggtgctggataaagagggcaaaccgctgaccgtcagcccctccggccgtaccgagcagaacatcatcgtgtggatggatcaccgggcgatcgcccaggccgagcgcatcaacgccaccaaacaccgggtgctggacttcgtcggcggcatcatttcgccggagatgcagacgccgaaactgctgtggttgaaacagcacatgcccaccacctgggccaacgccggctacctgttcgatctgccggacttcctcacctggcgcgccacccaggatgccacccgctcgctgtgctcgacggtgtgcaagtggacctatctcggccacgagcagcgttgggacaagagctacttccagcagatcgggctggaagacgtgctggaacatgacgcggccaagatcggcagcgacgttaaaatgatgggtgagccgctgggtcacggtctgacccagcgtgccgccagcgagatggggctgatcgccggcacggcggtgagcgtatcgatcatcgacgcgcacgccggcaccctcggcacgctgggcgccaccggcgtctccggcgaggtggccgacttcaatcgccgcgtcgcgctgatcggcggcacctccaccggccatatggcgatgtcgcgcaccgcgcgctttatcggcggcgtctgggggccgtattactcggcgatcctgccggaatactggctgaacgagggcggccagtccgctaccggcgcgctgatcgaccacgtcatccagtcgcatccgtgctatcaggagctgctggcgcaggcgaaagcccaggggcagaccatctatgaggtgctgaacgccattctgcgccgcattgccggcgagccggagaacatcgccttcctgacgcaggatattcatatgctgccgtacttccacggcaaccgctcgccgcgcgccaacccgacgctgaccggcatcctgaccgggctgaagctgtcgcgcacgccggaagacatggcgctgcactacctggccaccattcaggccatcgcgctcggcactcgccacatcatcgaaaccatgaaccacagcggctacagcatcgataccatcatggccagcggcggcggcaccaagaacccgatcttcgtgcaggagcacgccaacgccaccggctgcgccatgctgctgccggaggagagcgaggcgatgctgctgggcggcgcgatgatgggcaccgtggcggccggcgtgttcgacaccttgccggaggcgatgagcgccatgagccgcatcggcaagacggtcacgccgcagaccaaccagataaaaagctattacgaccgtaaataccgggtgttccacgagctgtacaacgaccacatgaaataccgccggttgatgcaggaggaggcgtgatgcagcaggagtggcggcaggccgtacagggctggcaaacctacagccaggagctggcgcagctgggcgaacgcctcgacgcgcacacctggcagcggctgctggcgctgctggccgactgccgcggtaaaatcgccgtcaccggcgtcggcacctcggggattgcggcgcgcaagatagcccatatgctggcctgcgtggagcggccggcggtctatctcgacgccaccggcgcggcgcacggcgatctgggcttcctgcgcgccgacgatctgctgatcctgatctcgcgcggcggcaattccgacgagctgacccgcctgctgccgacgctgcaggccaagggggtgacgctgatcgcggtgacggaaaacccgcattccgccatcgcgcaggcggcgcagctgacgatcgctaccggggtgcagaaggagatagatccgctgaacatgctggccaccacctcaattgtgttggtgttggcgatcttcgacgccgcctgcgcctgcctgatggcgcgcagcggttacgacaagagcgccttgctggcggtgcatccgggcggcggcgtggggaaaagtttgcgagaggaaaactgagggcccgacacagcgggcccggcagacattacagcggcatgtagatatcgaagcggtggcttttggtcagcgtggcggcgtgcgccggcacgtcggccagcggcggcgcgtagtccgggcgtttcaccaccacgcgcttggtggccaaacggcgcgccggttccagcaggccgtcggcgtcatcgtcgctgcccaccagcgattgaaacacccgcatctctttcttcaccagcgcgcttttctgcttgtgcgggaacatcggatcgagatacaccacctcggggcgcgggctgagatccgccagcgccgtcaggctggaggcgtgcagcagcgtcaggcgctcgcgcagccacgggccgatttccgcatcctgatagccgcgctgcaggccatcatccagcaatgccgccaccaccggattgcgttccagcatccgcacccggcagcccaacgccgccagcacgaaggcgtcgcgccccagcccggcggtggcgtccaccacgtccggcaggtagctgcccttgatgccgaccgccttggccaccgcctcgccgcggccgccgccgaagcggcgccggtgcgccatggcgccggagacgaaatcgacgtagatcccgccgagcttcggctcgtcgcgcttgcgcagctccagccgttctggggtcagtaccagcgccatcggcgcgtcatcgtcggacgtcagccgccagcgctgcgccaaaacagacaaggcgccgggatcggcgcctgcttcacacaataaacacacgctcacgtgtcgggttatcctttaatgccgtaatggcgcagcatagcatccagctgcggctcgcggccacggaagcgtttgaacagcgccatcggctcttccgaaccgccgcgcgacaggatgttgtcgaggaaggatttgccggtctcggcgttgaatatcccctcttcttcgaagcgcgagtaggcgtcggccgacagcacttccgcccacaggtagctgtagtaacccgccgcgtagccgccggcaaagatgtggctgaaggcgtgcgggaagcggccccagctcggtgaaggcaccaccgccaccattttcttcacttccgccagcgtcggcaggatctgcgcccctttttccgggctgtattcgaagtgcatgcggaaatcgaacaggccgaactccagctggcgcaggataaacagcgccgcctggtaattcttggccgccagcagcttgtcgagcatttccttcggcagcggctcgccgctctggtagtggccggagataaacgccagcgcttccggctcccagcaccagttttccataaactggctcggcagctcgaccgcatcccacggcaccccgttgatgccggagacgccggcggtatcgatctgcgtcagcatgtgatgcagaccgtggccgaattcgtggaacagcgtggtcacttcgttatgggtgaacagcgccggctggtcgcccaacgggcggttgaagttgcaggtcaggtaagcgaccggtttttgcaacgtgccgtcggccttgcgcaggctgccgacacagtcgtccatccaggcgccgccgcgtttgttttcgcgggcgtacagatcgaggtagaaactgccgcgcagctcgccgtcggcggcgaacagatcgaagaagcgcacgtccggatgccaggtttccacgtctttacgttctttggcggtgatgccgtagatgcgtttcaccacttcgaacagcccttccaccacccgctgctccgggaagtacgggcgcagctgctcgtcgctgatggagaacaggtgctgtttctgtttttcgccgtaataggtgatgtcccaggcttcgagctcgtccacgccatagtgctgtttggcgaaggcgcgcagctgcgccagctcttgctcggcctgcgggcgggcgcgcttggccagatcgctcaggaagccgatcacctgctccgggctctccgccattttggtcgccagcgacttgtcggcgtaggtatcgaagcccagcagctgagccagctcgtggcgcagcgccagcgtttccgccatcacttcgctgttgtcccatttgccggcgttcggcccctgatcggaggcgcgagtggcgaaggcgcggtacatctcttcgcgcagcgcgcggttgtcggcgtaggtcagcaccggcaggtagctcggcatgtccagcgtcagcaaccagccgtcttgctctttggcctgcgccatcgcctgcgcctgcgccagagcgctttccggcaggccgctcagctcggcttcgtcggtaatcagtttgctccagcccatggtggcgtcgagcacgttattgctgtaggtggaacccagttcggacaggcgcgcgacgatctcgccgtagcgctgctgtttgtccgccgacaggccgatgcccgacagttcgaaatcgcgcagcgcgttatccaccgccttgcgctgcggcacgctcaacgcctcgaacgccgcgccctctttcaggctgcggtaggcctggtacagcccttcgtgctgtccgacccaggtgccgtactcggacagcagcggcagcgcctgctcataggcggcgcgcagctccgggctgtttttcaccgagttcaggtgcccgatcggcgaccagatgcgcgacaggcgatcgtccgactccgccaacggctgacacagattgtcccaggtgaacgggcccggctgcgcgaccacgcgctctaccgcagcgcggcagtccgccagcgcggattgcaccgctggcacgatatcttcagggcggatcgccgagaaaggcggcagggaaaacggggtcagcaacggatttgtcatagggcagtcctgattagcgttgggcccgccgcacgggcgagccttaaaatgcgtatgaatctctaacatggagccagacaacaggaaaatcaatgcccggcgttgatcgttcgtgccttaaacggcgctttggcggatgcgggcggccagcgccgccagctgttcgtcgtcggcgcgcgcggcgtcgtgggaggagatatagccctcataacgttcgaaaaacttcggcgaggtcgattcgatcggccgccactgttccagcgatgcggtgccgtgcagcgggatcagtttggcgtgcacgtggtcgacgccgtagccctcgaacaccatgccgcagcggccgacgtcgtcgaacgcgcgatccagctgcttcgccacccgcttggtcgccagcatcaacgcgctcagcacctcgtccggcagatcaaacgcgtagctcgggtggtgcgccttggggatcaccacgctgaaaccgtcggtattgggaaagatggacaggaacgccagatggtcgtcgtcttcccagattttatggcacggcgccttgcccgccacgatgtcgcaaaaaatgcagctcatcctttctccttgtgattcacagcgtttcaacccattcgaactcttcgaacaccagccacatgtccggcgcaaaagtgccctcgcgggtaaagaactcttgatgcccctggcgccaaaacgccaggcttttgtcgccttcaccctctttggccgccatctcggcggtcacccgatcgtagcgcaccaggcgcagcgccagggttctgatcacgcaggccggttcgccgcggccatcgagaacgatgctgtaatcgccgatccgcggggtttgttcccgacgatagctcgcataggaactgcaggtggcggttttatccccgctcagcaccaatcccagcagttcgtcggctaacgcggggccgtcgccgaatgcccagcgcgccgcgtcggggtaattcgccaaaatcgcctgtttgctcatcgtcctgtccctttctgttaacgtctgcggcaacggagtccggtttttcccggccagacagtttatactgtgcagattataagccttattgcattgaatgctccgcctgcggagcacaaggaaccgccacccgtcatgttaagttatcgccacagtttccacgccggcaaccacgccgacgtgctcaagcacaccgttcagagcctgatcatcgagtcgctgaaggaaaaagagaagccgttcctgtatctggatacccactcgggcgcgggccgttatcagctcagcggcgaacacgccgagcgcaccggcgaatacctggaaggcatcggtttgctgtggcaacgcgacgatctgccggaagagctggcggcctacatgagcgtagtgcacaacttcaaccgttccggcacgctgcgctattatcccggctcgccgctgatcgcccgccagctgctgcgcccgcaggacaaaatccacctgaccgagctgcacccgagcgactacccgctgctgcgcagcgaattccagaaagacgagcgcgccaaagtgcagcgcgccgacggctatcagcagctgaaatcccagctgccgcccctgtcgcgccgcggcctgatcctgatggatccgccgtatgaaatgaagaccgattaccaggacgtggtcaaaggcattcaggaaggctacaagcgtttcgccaccggcacctacgcgctgtggtacccggtggtcatgcgccagcagatcaaacgcatgctgcgcgatctggaagccaccggcattcgccgcatcctgcagatcgagctggcggtgaaacccgacagcgatcagcgcggcatgaccgcctccggcatgatcgtcatcaacccgccgtggaagctggaacagcagatgaagaacgtgctgccgtggctgcacaaggtgctggtgccgtcgggcatcggtcaccatctggtgaactgggtggtaccggaataaaccccatcagggcgcggtttgccgcgccctgcgtccacctatcgcagccatcgacgcaatctttgcgacaaaccccggtcaggcgttaaactcttaccctcttcaaattcacaactcatggaaatcccagatgacgaaacattacgattatctagcaattggcggcggcagcggcggtatcgcatcgatcaaccgggcagccatgtacggccaaaagtgtgcgctgattgaagccaaagagctgggcggcacctgtgtaaacgtgggttgtgtaccgaaaaaagtcatgtggcacgcggcgcagatcgccgaggccatccatcagtacggcccggactacggcttcgacactaccgtcaacgccttcgactggaaaaagctggtcgccaaccgcaccgcctatatcgaccgcatccacaattcctacgataacgtgctgggcaagaacaaggtcgacgtgattaaagggttcgcgcgcttcgtggatgcgcacaccgtggaagtgaacggcgaaaccatcaccgccgatcacatcctgatcgccaccggcggccgcccgagccatccggctattccgggtgcggaatacggtatcgactccgacggcttctttgagctggacgccatgccgaaacgcgtcgccgtggtgggcgccggctatatcgccgtggagatcgccggcgtgctgaacgcgctgggcgcggaaacgcacctgttcgtgcgcaagcacgcgccgctgcgcaccttcgatccgatgatcgtcgaaaccctggtggaagtgatgaacaccgaagggccgagcctgcacaccgaatcggtgccgaaagcgatcgtcaagaacgccgacggcagcctgacgctgcagctggaaaacggcaaagcattcaccgtcgactgcctgatctgggccatcggccgcgaaccggcgaccgacaacctgaacctcggcgtgaccggggtgaaaaccaatgagaaaggctacatcgacgtcgataagttccagaacaccaacgtcaaaggcatctacgcggtgggcgacaacaccggcgcggtagaattgaccccggtcgccgtggccgccggccgtcgcctgtccgagcgcctgttcaacaacaagccggacgagcatctggactacagcaacatcgccaccgtggtgttcagccacccgccgatcggcaccgtcggcctgaccgagccggaagccatcgagaagttcggtgcggacaacgtgaaggtgtacaaatcctccttcaccgccatgtacagcgccgtgacgcagcaccgccagccgtgccgcatgaagctggtgtgcgcgggtaaagaagagaaaatcgtcggcctgcacggcatcggcttcggcatggatgaaatcctgcagggcttcgcggtggcggtgaagatgggcgccaccaagaaggacttcgacaacaccgtggctatccacccgaccgcggcggaagagttcgtcaccatgcgctgaggcgcaacttcgccgggttccggcgcgtaacaggccaggcgcgaaagcgtctggcttttttatttatcccgctcgcctcacggcgcccggcggtaatgatcgcgaagaaacaccggcaaatcgttcgccggtgcagcaaagggcacctgatagagcatatcgccgacaaaaccacgatgataggtcgcgtggttgacgacatgcagcacgatttcctgccgtgtcatgcggccttcccccccgccgacgaactcgaaatgcaccacctgcgccagcgcctcgggcgaccagttgtccacctgttcgatataccagcggtccatttcctccaccgcacaccgcagagagtcaagcgcaggcgtttgctcggtgttgcgcgcgaggtagccatgcttgcggccttgcagatggtgcctgaagatatcgtccaccacgtacacgtgattcaaggtatgcaccatattgccgaaacgggtcgggcgcggccgcagcgcttcgtcctccggcaaggccgccacacagtcaaaggtcaaggcgttcgcccacgctttgtaacgcaccagcattttcaaggtatcgatggccgttgcagacatactgttcactccttatcggatgaaaatcgatattccgttcagccgcacgcgggtgcggcggcgcgttctacgccgtgccaatcccatgcagccgaccttcgacctgagtgcgcgtattgccacccacccaaatccggccgctctcgtcgcgggtgacatgcacgcgcccgttgcgcccacggcagcggccctgagcggcgatatagccgccgctgaccacgccgcttgcaaacagccactgagccagcgaggcattgaggctgccggtgaccggatcttcgacgatagcgccaaggtgatcgctcaaaaaagcgcgcacctcgaaggctgcgtcaccatcggcatgtgggccgacgacgccaatgtccactctgcgcggccagcttctcgccggcgtcagggaaagcacccgctcggcgctggccagccggatccccagccaccccggaccgttatcgatccaggcggcatcgagcgcctcctcaggcgcgatccccaaaaaccgcagcgcgtcggccaacgccgcttctgacggcgccccggagcgaatcaacggcggcgcggcaaaacacagccgtccgccctcgcggcgaatgctcaccaagcccgccccgcactcctggatgatctccgcgtcattacgcggcgtaccgcccgcagtgagccaggcatgacaactgccgagcgtcgggtgcccggcaaacggcatttcacgatccagcgtgaatattcgcacccggtaatccgcctgtgagtgcataggcggcagtaaaaaggccgtttccgacaggttgaaccaacgcgtcaagcgctgcatgtcctccgtagacaacgctccggcgcccgtaatcaccgccaacggattgccggcgagtggcccggcgccaaagatatccaccatctgcatgccaaaaaccatcgcttctctcctcaggttaacgccgggcgttcattacccccgcgatatcaacagctccaggcccgccaaagcgaacagcagcgcaagcgttccttcaatccagcgcctcacccgggtgtaaaacgcgatcatcggcgacgttgagaacagcagggcataccccccgaaaatcgtcacgccgagcaacgcacacccgccgataatcgccggtaaaacaccttcaggcgccccttgtcgcaaacccagcgacatgatcgccatccaggacatgatggccttgggattaccgagatgcatcagcaccccctgccgatacaacctctgataagatcgcgcactatcccctgccgctatgcctgtcgagacgggagacgcccgtaatgcggatcggccggcgcgcagcgccagatacagcatatacacgccgccaacgatcttgatggtccacagcgcctgcgcatacgtggccaacacggcggaaaggccggtcgcggccaacatcgcccagcacagcgatccggtcaccaccccggcggccaacaccaatgcgggcctgcggccgtcacgcatcgccacgcccatgatcgccatgttgctggggccggggctggcagttgcgaggagataggcgccgtaaaccaacgcaagctgactgaccatcatggaaaaactccgctgacccgccttacggccgagccgtagttgaaaatgccgggactcctcaccaacatagtatgtgttacacttttcgcctatttaaatagtgtcacgtgacactatattctttctccggagagcgaatatgcggcttcaatccccctggcagccccgcctggccaatgtggaagccactaccgtcgaacggctggtgttggcgttggctgacgacattatcgagggcaagctgcaagggggcgatcgtttgccggcccaccgtacgctcgcctggcaattggcgatcggtctgggcacggtgaccaaagcctatgccatcctggagcggcgtgggttggtgcgcagcgtgaaaggccgcgggatgttcgtggcgatccgccgcgcccgtgaaaaacgcgaaatcgatctttcatccaatgcgccgccggcgatgcttaccgatcgtttgctggcgcgcacgctggccagcattgcgcggaaaatggatgtggaccatctgaacttctattcccctccgaccgggcatctggagcaccggcgtttgttggcccgctggctggaaaacgccggcgtcacgatcgatccgtcgcacctggcgctgaccagcaatgcccgtcaggcgatttcgctggcgtttgacctggcctgcgggccacgcggcacgatactgaccgagagactcacctaccccggcgcgatcgcgctggcccgacgtaaaggccatcgcctgatcggcgtggagatcgatgcgcaaggcatagtgccgcaggcgctggcgagcgcgctcgagcgagtctcctccggccataccgcggtctatctgacgccgacactgcataatccgacaacagccaccatgagcgccgagcgcaggcaggctatcgtcgagatatgccggcgggcgaatgtctggatcatcgaggatggcgtgtatgcgctggggcattcagcggcgcctgcgctcgcggctctggcgcccgagcgggtgttccatgtcaatggcctgtcgaaaacgctcggcccgggattgcggatcggcatgctgactctgccgcccggcatgcaagctgcggcggaagaagccttgcaagatcttcctttcgcaccttcgccactgtcttgcgctgtggtggaggagtggctggccagcagcgcgatcgagacgataccgcaagcgttgcgccatgaggctcagcgaagagtacatctggccacctcgatattcgatgccgacgaatgcgtatcgcatcccgacgcttatcatgtctggctgccgatgccgcgcgaaaccgccgagtctgtggccgccgccgccgcattggccaacgtaaaggtgacgccgccggacaccgtgatggtagaccgcgacgaacgtgcgacgggcattcgcctgtgcctgggttccccctcgccggacgagctaacggcaggcctgacgcagctggcgcagctgttgaaagcgcatcgaaacggctgacaaacggaagagaaaggttacgcgtacaggccgaccggcccaggactgttctttttgtgcggtttactattcccttcgcacccgcctgctttttctgccattattctgcctgataaattagcgggactgatacaaacctccccgcgcctctggagaacgccgatgctgttcaaactatgcaaaacccttgcgatggcctgcgtggccctgattatcgcccagagcagcgcgctcagctttaccctggaagtggcgggcaagatcgacaacgtgaccgacccggtcaaaaaaagctatctgttcaccgataagcagctgttggcgatgccggtgcgcagcatcaccacctccacctcctggacgccgcagagaaaatttgaagggatttcggtggccgatatcctggagcgcgtcggcgccaagggcgagacgctgactttctacgcgctgaacgattattacatcgacgtgccgctgtccgacgtcaagaagtacaacatgatcctggcctacaggatggacggggaaatgctgaagctcagaaacttcggcccgctgttcctggtttacccgcgcgacgccgccgggcctgaactgaactcgccgttgtacaattcacgctttatctggcaagtcgacaggatcgtgatcaaatgaagctgacgacctttaagaacggcagcaggctggcgatcccggccatctttgccgcgctgtttttagtggcttcgaccgtcacgctctattactacagcgccaccctgtcgaagaaagggctgtatgccatcgccggcacgcaggagaactactcctggtctatcgccaagttctccatcaagctggcggagttcgacacgttcgtcgagcagcaaagccatgccgcgcaggtggacagcgacaacctgcggctgcggttcgaaattctctattcgcgcttttacgtgctggaaaccgtctccgaatccacgcaaccgctgtacgccgagccgggctacccggaagtggtcaagcagatgcgcctgcagatggatcgcatcgataaactgctggataacccgaaaatcgacttcagccaggttttcgcggccatgaaggccatcaagccttacgccatcgaaatggccaacctgaccgaccacgccgaggtgaagcagcgcaccgccgcctatgaggactacatcgagaaacggcacatcattttctatgggctggtgatcgtcatgttctcggtgatcgcgctgatcgccatcaccctgatcgtgttccgccagcagcggctgaccattcgccagcaggccaaggccattgaggcggagaaagcgacacgcaccaaaaacgccttcctcggcgccatcggccacgagctgcgcacctcattgcagagcgtgatgtcggccatcgacgtgctggtgaacacccgggtgtcggcggagcatgcggacactttccagcggctggagaccgccgcgcagcaaatcgaaagccagatgaaggatctgaccgactacgcgcacctcgacagcggcatgatggaattgcgcatcgtgccgttcgacgcgcagaagctgatcgcggaaaccgccaatgaaatcgccaccctgacccgcaaagagcaggtcaaactgagctgcgaagtggagtgcagccacctgttggtgcactccgatccgctgcgcatccggcagattatcgttaacctgctgaccaacgcctacaaatacaccgaaagcggcagcattacgctgcacagctgcctgcgccgtcaacccggcggcagttcgctgattatcgaagtgaccgacaccggcatcggtatcgaaaaagaccagctcgatcagatcttcaaaccctttacccagttggatcagtcgcataccaagcaatatgccggcgtggggatggggttggcgatcgtacacggcctggtgacgctgctcaacggcaccatcacggtgtacagcgaaatcaagaaaggcagcacctttatcgtcagcattccggtgcagatcagtgaagaagagcgcgccgacgagcccgccgccgccaatgcccccctgcagcaaaagccgcagcaggtgctggtggtggatgacaacaagtcggtgggtgacgcctttgcggcgttgctggataagctgggttaccagcacgaactgtgcgactcgccggagcgcgcgttgcagaagctgctcagacgcccttacgacgcgctgttgctggatctgcagatgccgggcatcgacggcgccgccctggccaggcagctgcgcaatcgtcgcggccccaaccgccatgtgccaatcatcggcatcagcgcctatacgccggagcagctgacggcggatcagcgcgccctgttcgataactacctgatgaaaccggttcggctggatgcgctgtcgagcgcactggccgaggtgttccccgctaaagattaaaacagcgttgcagtgcggcttcgatcacatggagccgcaccggtttttcataaggaccgagcacatcgtactcgcgcatcgcctgagcgatctccgactcgcgtcggtcggtgcccagttcgccggtcagcaccagtaccggcgcgtccgggttgtcggaggcgcggatggtggcgatacagcgatccgccgtttcctcaccgatcagccagtccaccacgtaaccgtcgaacaggctttgctgcaacgcttggcagaagctgtcgacatcgtaaaacgccactgcgttgaaaccgcagccgccgaggtacttggccagctcatcggccgcctgatgcgaatcgtccaataccgcgatgctcaaccgctcgtcatcgccgtagccgggccggatttctatcagttcgacgccgtaacgcagacctgccggcgcctcttcggcgcgatagatatgccattgcccctccacacgcagcgccacaaactccgccggccgcccggcagaaagttcgtcgccaatgtgcccgacgcaagggatcgccacccccgccacgaaaaagatggcatcacgcgccatgtttggctcggtcgtctcgtgttcggcgctcaaatcggcgatcgccgccggcgtttctcccaacgcggccgcgacgctgttgatctgttccagcgtccaggggctttgccctttcaatttgcggtgcgcatgtgaaaaactcagatccaagatgcggctgagttcgcgggcatgctgacgttttccaatcccgtaatgtaaaaacagctccctgacccgattggcaatcgactgtgaatcgaatttttgatgattgttatccatttgttccttcgattttttttactgatttatcagtcgttttgattatttctgctgaaaaagccacacctaaaactagcatcccatgcaattatgcgttaaaaacgttgcttgacataccatgttgtatcgtcaaacatggtatcaaaagagacatacagcaatacactataaaaaataacaccagcacgatttttaataataaccatagtaacaccagggaaaatttgttccgttgccgctactgagacgatgctcacatcgcttggactgcataagcaaaacggggcttgagcctttagcgctaatctgttttacccacttttaagccgggatccgtcagggtcccggttttttattgccctggcgccgcgccatcatacggactcaccccgcagccgcaaataaaaacggagccggcatgccggctccgttgaccctgtaatgaccgcttggcttagaagcgccaggtgaaaccggcgttgacgctgttgtcttggtggttctgcgacagcagcccgccgtagcccagcgacagcgaggcgttctcgttcaccgccacttccgcccccgccttcagcaccatgccgtcgcgcgacaccggcacgctgtccaccacgaacggcgcgttgccgccgttgaaccgcagcccggtgccacgctccagcccgccgtactggtgttgccaccccagctcgctgcgcagcgccaccgtcgtgcccgggctcacctgccacgcagtgtccgcacgcagccccagcgtcgacaccgtcgcgtcggtgtgctgcttgtcgccgcgcagcgccgctgcgccgccgctttccgcgatgccgttgttttcaaagttcacgtacgccaggttgacgaacggctccaggttcagccactcacccttcacgctgtaacccgcttccgcgaacagctgctcggtgcgcgcgctgtacttcgccgtgtcgcggtccgactgcatcccgtagttcaccgaccgtttggtgtcgatgcggtgccaggtatagcccgccccgccgcgcagcgccagcgccccgaactgcttgtcgccgtacgccgccaggtggtagttgtcgctgtccgccttcgacccgtacccgccgtgcagcgaggtgcgggtgtagccggtcgccacccccagccgccagtcggccgccgccgccgagtccagccccaccagcaccccgtaggtcgaggcctgatagcccgtggcgttggcgtcgcccgacgcatggtcccacgcccccagcagctgcgcccaggcgccgtcctcgtccgccttgatggccgacgagctcgccagcccttccgcctgacgcagacgcccgttcagcgcctcacgcaggtagcggctgtcgttcaccagcgccgacgcgatgtccgcatggatttgccccgacagctggcggaacgcctgccgcgcctcgcccgccgtgccgctgttgagaatgctctcgtacaccgggttgcccgccgccagcgcatccgccgccgccgccaccgcccgctcgttcgccgtctgcgccacgctggcgaagcttgtgccgttgcgcccgacgctcagcgtcaccccggtcggctggtagctcagcccggtgccgaggaacaggtagttcggcgccaccgcgtcaaactgcccgctcaccccctgctgcgcactcaggatggtgtactgctggcccagcaggctgcgcacctcgctttgcgtcagcaggttgctgctgttctccagcgtcaccgccacctcgccgccgccgatcgtcgccgctccgctgctctggatccgatcgctctggccgttcggccccacttccaccgcgtagcgcgaacccggctcgaagctgacgttgccggccacgttcagggtgccgatcgagttgcccggtgccacggtgccgccacggcgggcggtcagcgaaccgaccgtgccgctgccgccgacgatgccgccgttctgcacgctgacggccgaggtgaccgagccgttgatcgccagccgcccctgattgaccagcgtcgggccggcataggtgttggcgccggtcatgaccagcgtgcccatcccttctttggtcaggccgccatggccggagatgttgttggagtagacttccagctcgcaactgatgtcgtcacactttctggcgtgcagcgtgccggcatccacctcggcgcccagacccggaatattggcgacaaactgggtcgggccgtaggccacgcccgtcggatccggaatgcggaactccgcaggaatatcttcaacggtatagaacatgcccgggccgttgatggccttgcccaggttgatcatcccccagccgtagagcgcgtcgatgcccggcgcgcccatgtcggtggcggtggttttcagcacgtcggcaatctgcgccgagctcatgtacgggaagcgctgcagcaacaccgccaccgcgccggtgacgtgcggcgtcgccatcgaggtgccatttttattgccgtagtccgacaccaggttggccggatcggaaccgttggccacggtgctgtagattttgctgcccggcgacgagacgcagaagctggcggtatagccgcaacgggaagagaagctgctgatggtgtaaggcacgctgttggtcgatgccgcatcctgcgccacgctggcgaccgacagccagttcggcgcgatgtccggcacgaaataggccagcccgctgatcacatccggctggttgtagttgccgtcgttgccggcggcgaacagcaccagaatattcttgcgcgcggcgtcgatagcgccctgataacctgcgccagccaggctgccgagcagcggtttgacctgatcgaactgttcctgcgcatccttcagctcaaagtgcaacgcattaggatcgcggccgccatcggacagaaagtcgggaatgctgacgccccagctgttgttgatcacccgcgcgccgctcttgatcatcgcctgccagccggcattagtgacggcgccgtccaggccgaggaattcgccgtaagccgggccgtcgttgtcgttatcgacgctgatcacctgcgaatcgaaggccacgccgtgcatgccggtgccatcgcggttggccgcgctgatccccgcgacgtgcaccccgtggttgctcaatgtcgccccgctatagaaatggaaggtgccgtcgaagtaaaagcgatcgccggcgttgatccccggccggtgcgggtcggtataggcgcggtagccttcggtgacgacgttgatcagtttgccgtcgccagcaaactcgggatggtggttaaccggggtgtcgaaaatgcccaccttctgccctttgccggtatagccggcggcgtaggcctcatcggcgtggatcgcccccagcccccagttggcgttgaattcggcgctgcgccagctggccggatcgccggcttggccgttcacctcgtgcggcgccgcctgcgcataccccgccagcgccatgcagcagaccagcgcgttcagccgccacggcgagcgacgagcgtttcctttgctatcaaaacccattgttgttgtcatttccttaccttttgcttgttattggccgacgccccaggtgcgccgggttctcattagcaggatgtgaaaaaggaaccgcccgcagacggttcccgtacaaggattgagtcgatgttgcttagaagcgccaggtgaaaccggcgttgacgctgttgtcttggtggttctgcgacagcagcccgccgtagcccagcgacagcgaggcgttctcgttcaccgccacttccgcccccgccttcagcaccatgccgtcgcgcgacaccggcacgctgtccaccacgaacggcgcgttgccgccgttgaaccgcagcccggtgccacgctccagcccgccgtactggtgttgccaccccagctcgctgcgcagcgccaccgtcgtgcccgggctcacctgccacgcggtgtccgcgcgcagccccagcgtcgacatcgtcgcgtcggtgtgctgcttgtcgccgcgcagcgccgctgcgccgccgctttccgcgatgccgttgttttcaaagttcacgtacgccaggttgacgaacggctccaggttcagccactcacccttcacgctgtaacccgcttccgcgaacagctgctcggtgcgcgcgctgtacttcgccgtgtcgcggtccgactgcatcccgtagttcaccgaccgtttggtgtcgatgcggtgccaggtatagcccgccccgccgcgcagcgccagcgccccgaactgcttgtcgccgtacgccgccaggtggtagttgtcgctgtccgccttcgacccgtacccgccgtgcagcgaggtgcgggtgtagccggtcgccacccccagccgccagtcggccgccgccgccgagtccagccccaccagcaccccgtaggtcgaggcctgatagcccgtggcgttggcgtcgcccgacgcatggtcccacgcccccagcagctgcgcccaggcgccgtcctcgtccgccttgatggccgacgagctcgccagcccttccgcctgacgcagacgcccgttcagcgcctcacgcaggtagcggctgtcgttcaccagcgccgacgcgatgtccgcatggatttgccccgacagctggcggaacgcctgccgcgcctcgcccgccgtgccgctgttgagaatgctctcgtacaccgggttgcccgccgccagcgcatccgccgccgccgccaccgcccgctcgttcgccgtctgcgccacgctggcgaagcttgtgccgttgcgcccgacgctcagcgtcaccccggtcggctggtagctcagcccggtgccgaggaacaggtagttcggcgccaccgcgtcaaactgcccgctcaccccctgctgcgccgtcaggatgttgtactgctggcccagcaggctgcgcacctcgctttgcgtcagcaggttgctgctgttttccagcgtgaccgccacctcgccgccgccgatcgtcgccgagccgctgctctggatccgatcgctctggccgttcggccccacttccaccgcatagcgcgaacccggctcgaagctgacgttgccggccacgttcagggtgccgatcgagttgcccggcgccacggtgccgccacggcgggcggtcagcgaaccgaccgtgccgctgccgccgacgatgccgccgttctgcacgctgacatccgaggtgaccgagccgttgatcgccagccgcccctgattaaccagcgtcgggccggcataggtgttgttaccggtcagtaccaacgtgccgataccctgtttggtcaggccgccatggccggagatgtcgttgctccagaaatccaggccgcacagcacatcgctgcagacgcgctcggtcggtttacccttgtccagcaccgcgccgacgcccggcagatccaccacaaactgggtcgggccgtaggccacgcccgtcggatccggaatacggaactccgcaggaatatcttcggcagtcaccaacatgcccgggccgttgatggctttgcccaggttgatcatcccccaaccgtagagcgcgtcgatgcccggcgcgcccatgtcggtggcagtggttttcagcacttccgccacctgcgcaccactcagatacgggaaacgctccatcagcaccgcgacgctgccggccacgtgcggcgccgccatcgaggtgccgctgtatttggcgtagccggttgtcagattctctaggctggtgccttcgattaccgagctgtatacccgggtgcccggcgccgagacgcagaagctggcggtataaccgcagcgagaggagaaggtgctgatgctgtaatcgccggtattggtcggatcctgcaagctggcgaccgacagccagttcggtgcaatctccggcacaaaataagccaggccggccatggcatcggggttattcagattgccgtcgttaccggcggcgaagatggtgaccacgccgctgcgggccgcgtcgatcgcgccctgataggcgccgccaggcttggtaccgaggatctgtttgatctgatcgaactgcttttgcgcatcgtttactgtgaaatgcggataagccgggtcataaccgccctcatcaaacttttcggtaataccgatgccccagctgttgttgatgatgcgcgcgccgctggccaccagcgcatcccaaccggccttatacaccgcgccgtcgttgccgaggatgatgccgtcctccgggccgggatcgccgttctccgcgctgatgatctgcgcgttgaacgccacgccgtgcatggcgccgccgtctcggctgccggcggcgatgccgcccacgtgggtgccgtgcgaaccgagcgtgccatcggaatccacgctcggcgtgccgtcatagcgaaaagcgtcgccttttttcaccggaatatagggatcggtgtattcgcggatgccttcggtaaccagattgatcaccttattctcaccggcgaattccgggtgcttggcgtaaaccggttgatcgaaaatgccaagtttgatgccttttccggtataaccggcggcgtaggcctggtcggcgtggatcgcccccagcccccattctgcattgaactcactgctgcgccagctggccggatcgcccgcctggccgttctctatatagctggaggcctgcgccccgccaatcgccgtcaggcagatcagcatcgcgctccattgtgcgcgatgaactccgatttcaggccagccgaaggccgcccgagcggatttgactcctctacgtttcttctccatcccagataccgtccgttgttgtttgcaaatgttttataagattttttgtgtaacagtttggtaacaccaaataaataaagcacaacaatctcaagtgcgcttaatgtgtcatccggcagttcgacgggaggagagaatgtttcaggggtgaatcaggccagtgccgataagaaatgacaatgacgtttaccggtatcgaaacggcgataataagtgaagggataaattataatttactgataaataaaaatataactcagggagacatgaagagtgcggccgcctgaaaagtgcttaacaggcgtcttttatcacttttaattataaattttgccaatattcactcagtgaattatgctggtttttcactcggccatcggcaaaaattggattatcctgctgatgtttttttgcagttcgtcgcgtcctcttccgcctgacgcagaatggctttggccatccattgcgtgacgtcctgaatgctctcaagctccagcccccagatatctttcagcaccagaaacacctccgagccgtaaatcagcgagaaagcatgaatcactctctgcagagagaccggcggcagtttgccctgcagtggttccaccgccagcgccaacagacgcttgcggttgccgcgcacaaacttttcgcccggcgtggcgtgtgcccactgctgcaaagagagctgcagcgccgcgcgcaatgctccctcgtgccgctccatctgaggataggcgaaagtcagcaactgctggatgcgtttcagggcgtcatcgtcttgcgggcgccattccagaataggccccaggctttccgccaccacggcgctaatcagcgcactctgggtcggaaaatagcggtaggccgtcgcacgcgatacctgcgcatgcgccgccagttcggtgatcgaaggaaacgccccttcgtcatacagcgtcatcgcgctggccagcaacaaacggtaggtttttgcccgggtggaagtcagtaaaggatcaaacggggtgggaaaggcatctatcggcacataaacctcatgcatctgcacacgcttgcgcaacagaggatgcccctctgtcgactggctgccggcaaagcgccggccacgttgaaaagctcaaaaatgagacaggagtcccattttgcactgagctgcccttgcaaaaatgatactgccgtctcattatataaatacattaatcattttaatttaaacgccaacaccagggcaccctaaaaaatataacaaaatgatttttaaataaaaattagaaacaccccaggaagatacatgaaagacacttcaaattttgtctatattgctaccacagcagatacgaaaggacaagagctggagtatgtacggcggctgatcgctgccctgaatttacccacgcgaaccgtcgatctttccactcgtcgcttgccgtttgactccccggccgatatcggtccagaggacatcgcacgccaccatccggcgggcgccggcgcggtcttctgcgccagtcgcggccaggcgatcgccgccatggcgaccgctttcgaacgttttatcctgacgcgccgcgatatcgccgccttgcttggcctgggcggctccggcggcaccgccatcatcacgccggccatgcagcagctgccgatcggcctgccgaaagtgatggtctcgagcatggcggcgggagacgtttccgcctatgtcggcgccagcgatatcaacatgctgtattcggtcaccgatctcgccggcctaaatcgcatctcgcgacgggtgctgagcaacgcagcgcgccagatagccggcgcagtgcacttcgccgccgtcgactatcacgataacaaacccgcgatcggcctgacgacgtttggcgtcaccacgccctgcgttcaggcgttggttgccgaactgggaacacaatgggattgtctgacgtttcatgcgaccggcagcggcggcagatcgttggaaaaactgatcgataaccgccaactgcacggcgccatcgatttaaccactaccgaagtggccgattacctgtttggcggtgtgctgccctgcaatacggatcgtttcggtgccattgcgcgtaccggcatcccgtgcgtgctctcctgcggcgcgatagacatgatcaacttcggcgcgccgaatacggtgccggctcgctatgccaaccgtctgcgtcaccatcacaacccgcaagtgacgctggtacgcaccaacgcgcgggagaatgcgttaatggggcgttggatgggcgaaaagatcaacgcctgcgcgggcgaagtgcgtttcgttatcccggcgggcggcgtatcggctttggatgcgcccggccaaccgttctgggatccggcggcgctggccgcctttacgcaagcgctggaggagacggtatacgccaccgacaaacgccggctgataaaaacgccttatcatattaacgacccgcgctttgcacaggccgttgccgaacagttccggcgcattgtcggcggggaatgattatcactcactgcagaacctgccggtgataacgccaaataaaaagggccagacaaatagtctggccctttattattcaccgcgagcggatattactgaccggagggcatctgctccttcattttattcatgtggtccatcatcttttgctcgcgtttctgataattctcattgtattgttttttctgctcaggcgtcagcaggttatacattttattttccgctttggcgcgtgccagcatgcgttcggattgcgctttgccgatcgcgtcaatttgcgccttcgccttcgcttcgtcaaagctgtcggaagcgaccagattgtgcaacgcctggcgctcctctttcatgcccggcccgcgcttctggtgcgactctttcatgatatcgcgcatctgctggcgctgctgctcggtcaggttcagcccggcgaacgggccgcctttgccttcacccttgtgatgcatcattttcatcggcgccgcatccgccgccggggccgtcgtcgtatcggcggcgaacgccgcggaagcagaacccagagccagcgtggaagcaataaataaagccgtcaatttacgcataatcatttccttaaaaattttcttcatcaggagcgctgtacgttaacaggctcattcgttgtcggagataataataggctgataaatttcaagtaatgcgagggtgtgtaaactttttaaaacccgtctcggatttattcaccaattatgagaaaactatgaagatggcgtttatttgatggaaattttaatttctcggcaaaaatccccccggtggagttatttttccgctttctcctcaccgctataatttactcacctgcacggcaaccttgtatcaaccgttttccgatagcaggggaaatcactaagcatcacacgatccgatgttctcctacactttaaggcaagcggccgccgggcgacgtttacaccgcaaaactaatcattgcttatataatagtttccatcacccgccccgcctgtgaaaacctgttatatgatgcacagatgcgtacggcgatcgctttcgggccaacaggctgcccggcgctgtgccggccgcccgcccgtgctcttttgaggaatcgtcatgcccgcagaccaaggccctgagcttcttagcgctcacttcggcacccaaagcccccactggcggctggcgtttgacagcaatgccctggagctgtccgctattaagggcaaagctcatgtcgcggtggcgctcagcgccatggaagcggcgaaaatccgccgtctgaccggcgtgaccgccagccttgagctgaccattacgctagccggtgaaccgctgcatctgcatctggtcgggcgccgcgtcaacaacctcgaatgggcgggcaccgcttccgccttcagcgacacccaatccgtggcgcgcgacctggtgcacggcctctccttcgccgagcaggtggtgtccgaagccaactcggtgatcgtgatcgtcgatcagcacggccgcatccagcgcttcaaccgactgagcgaggagtacaccgggctgcacgaacacgaggtgatcggcaaaaacgttttccaactgtttatgagcccggaagaagccgccgcttcgcggcgcaacatcgccggcttcttccgcaacggttcgtcctatgaggtggaacgctgggtaaagacagtcaagggtgaacggctgttcctgtttcgcaacaaattcgtgcacagcggcagcggaaaaaacgaagtctttctgatctgctccggtaccgacatcaccgaagaacgtcgcgcgcaagagcggctacgggtgctggccaacaccgatctcatcaccggcctgccgaaccgtaacgccatacaggacaagatcaatcacgccatcaccacgcgcggtgaagagagtttcggcctggtgtacctcgatctcgacaacttcaaaaaggtcaacgacgcctacggccatatgttcggcgatcggctgctggtcgaggtcgctctggcgatcctcggctgcctgagcccggatcaagtgctcgcccgcctcggcggcgacgaattcttggtgctggcgccacaaagcgatcgcgagcgcctgcaaacgctggcgcagcgcattatcgacaggctgaagaccccttttcgcatcggcctgattgaggtgtataccggctgttcgatcggcatcgcactctgccctgagcacggcaacgatctcgacagcctgatccgcagcgccgataccgccatgtacgtcgccaaggagcacggaaaacgcatctataccgtcttctcgccggagatgaacaaacgcgtcgccgagtacatgtggctggacaccaatctgcgcaaagggttggagcaaaatcagctggtgctgtattaccagcctaaaatcgacgcgcacagcggtgaagtgcacagcgtggaagcgttggtgcgctgggattcgccggagcgcggcctgatcccgccgctgcagttcatctcctacgccgaggagtccggcctgatcggcccgttgggccaatgggtgctgcaaaccgccgccgggcaggcggcgcagtggcaagagcggggattgaatctgcgggtggcggtcaacctctctgcccgtcagctggccgatgacagcatcgtcaacgacctgctcggggtgctgcaccgtcaccgcatggccccctgtctgctggacttcgagttgaccgaaagcagcctgattgaagacgagaatcgcgcgcgcgcgctgatcacccggctgcgcgaactgggcgcgcaggtgcatcttgacgactttggcaccggctattcgtcgttggcgcagctggcacgcattcctctggacgccatcaagctggataaaagcttcgtgcgcggggtgaatttcaatccggtatcgcaatcgctggtacgcgcgatcgtcgcggcggcggaggcgttggccttccgcgtgatcgccgaaggggtggagaccgagagcgaaaaccacttcctcgacgaagtcggcgtggacgaaaaacagggctttctgttcgcgcggccaatgctcccggaacagctggagcattggctgcagtcctatcgcccgcgctcaccctccgcatgaggcgggcgcgttaacgttagccggcacgacgcaggttcagggtatggcgatcctgcaacatcaccagtcgctcgatgtaggcacggtctttttcctcaatggtaaaggccgagtgcacccaatcttcggtaatgtccatcagctcggaacgcgtcagctgcaacacgcgctgacgcgcccgcagcatggcgcgcatgccgttgagcttcggccggatggtatcgataaaggtgcgcgtcgccaggtaagcgtcgccgggctggaacagctggtctaccagcccgcggctctcgaaccactctgcggtgtgcgactcgccgccccaaatcagctcctcagccaagcgcatgcccgccttgcgcgccaccagcgagtacccccccatgccgggaaacaggttgaacgcaatctccgggaaccccatgcgcgcattgttttgcgccaatacgaaatggtgcgccagcgccgcttcaaaaccgccccccagcgcactgccttcaaccatcgcaatgctgaccgcgccggtgtcgaaaccgcgcgccgccgcatgcacgcagtcgatgcaggcgcgcgcgtaggccatcatcgcctcgcgcttgcggtttttgatcgcttcggcgaagaactgcagatcgccgccgacgttgaacatgttcggcaccagcgagccggtgacccagaagtcgaaccgcagcgaagactccttcgccgcctgcgccagcgtcatgatgtcttcaatcaatgcctggttgaagcaggggcgtggcgcagcgcgcagcagcatccacatgatgtgccgcccctcttcatagtaggcggagatctgcgacagattgcccgcttcggtaaacggacgacaggtggggtgattaagcaatttcataagaccttccagtttttctgttgatgacggatgagaccgttccagcccctacggctgcagcggagcggcgagcggcaaagcgcgacgccacatcatgagtaaacgctttctcgccgacgaaacagataaaaattggaggtagagaagtgaaaaaaaccgaggcgccacggggttttcataggaattttacctatcgcgccatccccggcatttcatgccgggcgctaacgcgttaagctcggaaattgaccgtttgccgccccggcgctcaaaacgccgcagggctttggctataatcaacgctgatacatgccgtttaacgttaaggaaatcgtgaagtaatgcctacaggaccagaccaggaacgccgccagcccgcacaagacacgccgccgaagccgcttatcgccatcaagaccggccatgagacgctcgaccgccgcattagcggtttttcacgtctgattgaacgcatcaaagcctggccgagcgtggcgcacctgctgcgcgccgccgaacgctttaacgatcggctgggcagccagttcggcgccgccatcacctatttttcattcctctcgctgatcccgatcctgatggtgtcgttcgccgccgccggtttcgtgctggcttccaacccggatctgctggcccgcttgatcaaccggatcgtcggcagcatcagcgatccgacgctggccagcacgctgaagaacaccgtcaataccgccattcagcagcgcaccaccgtggggttgaccggcctggcgctggcgctctattccggcatcagttggatgggcaacctgcgcgaagcgatccgcgcgcagtcgcgtgacgtctgggagcgcaatccgcaggatcaggagaaaatctatttcaagtacacccgcgacttcatctcgctgaccggcctggtggtcgcgctgatcatcacgctgtcgctgacctcggtcgccgggtcggcgcaggcggcgatcgtcaacgcgctggggctggacggcatcgaatggctgcggccggcgctgacgacgatcgcactgtcgatctcgatcttcgccaactatctgctgttcctgtggattttctggatgctgccgcgccacaaaccgaagaaaaaagcgctgctgcgcggcaccttgcttgcggctatcggctttgaggtgatcaagttcgtgatgacgatgacgctgccgcaggtggcgaaatcgccttccggcgcggccttcggctcggtgatcgggctgatggcgttcttctacttcttcgcccgcttgacgctgttttgcgccgcctggatcgccaccgccgactacaaaggcgacaaagccgtgccggaacgcgagccgccggcgcgctgaagccatgcgatcgtgccggtgttatcgcacacaccggcactttcctctggatatcagccagaaaaccagtcaatacgtctaaataacgcggcacgcgatccgaaaaaccagcataacagactacccaatcacttttctttgccgcttttacagccattccctctgtacgaaagccctttctcaacgtttaacgctgcagaaaacaagccagataaaacattagtctttttaaccggttagccgggtcattgcccaaagttcccgcgttgaaaaggccgaatgctgtcactaagatggatttttaccccctccaacaataagaaatagatatgcaagccaccatcgcacccccactcgacgccgacgacgcgtccacaccggtgaactcccgcgggaaagtcatcgtcgcctcgctggtcggcaccgccatcgagtttttcgacttctacatctacgccaccgccgcggtgatcgtgttcccgcacatcttcttcccgcagggcgacccgaccaccgcgacgctgcagtcgctggccaccttcgccgtcgcctttgtcgcgcgccctatcggctctgcgctgttcggccacttcggcgatcgcgtggggcgcaaggtgacgctggtcgcctcgctgctgaccatggggatttccaccgtgctgatcggcctgctgccgagctatgaaaccatcggcatcttcgccccgatcctgctggcgctggcgcgctttgggcaggggctggggctgggcggcgaatggggcggcgcagccctgctggcgacggagaacgcgccggccaaaaagcgcgcgctgtacggctccttcccccagttaggggcgcctatcggtttcttcttcgccaacggcaccttcctgctgctctcgtggctgctgagcgaccagcagtttatggaatggggctggcgcgtgccgttcatcctctccgcggcgctggtgctgattggcctgtacgtgcgggtatcgctgcatgaaacgccggtgttcgccaaagtggccaaggccggcaaacaggtgaaagtgccgctcggcacgctgctgagcaagcatctgaaagccaccatcctcggcaccttcatcatgctggcgacctacacgctgttttatctgatgacggtgtattcgatgacctacggcaccgcgccgcagccgctcgggctcggttactcccgcaacagcttcctgtggatgctgatggtggcggtgatcggtttcggcgtgatggtgccgatcgccggtctgctggcggacgcgttcggccgccgcaagaccatgatcgccattaccctgctgatgatcggcttcgcgttcctgttcccgaccctgctgggttccggcaaccaggcgctggtgatgggcttcctgctgtgcggcctgagcatcatggggctgacctttggcccgatgggcgcgctgctgccggagctgttccctaccgaagtgcgctataccggcgcatcgttctcctacaacgtcgcgtcgatcctcggcgcgtccgtggcgccttatatcgccacctggctggcggcccactacggactgttctacgtcggcatgtacctggcggcgatggccgggctgacgctgctggccctgctgctgatgaaagaaacccgccatcagtcgctgtgatcccctacggccccctcactgcgggggccgcacgcggtgttcgtttcctgtcataaaaccgggctatgctgaatgtttctctcggtaacaggatcggccgatgtctctgcgtcgtggggtatttgtctgcgtggcgctgctggcggctatcgccatcgcgctcttttacgggttgaaacccgaccatcccgatgcgctgtggcgcatcgtcagccagcaatgtctgcccaatcagcaggcgcacgacaacccggcgccctgcgcgcaggtggatgtgcaggccggtttcgtggtgtttaaagatcgcaacgggccgttgcaatacctgctgatgcccagcgccaaaatcaccggtatcgaaagcccggcggtgctggacgccgccacgccgaatttcttcgcgcaggcctggcgcgcgcgccacgtgatggcggaacgctatggcaaaccgatcgacgacggcgatatttccctggcgatcaattcggaatatggccgcacgcaaaaccagctgcacatccatatctcctgcctgctgccggcggtaaaacagcggctggcgcaaatcggcccccatttcatcaagcaatggcaaccgctgcccggcggcctgttggggcatgactatctggggcggcgggtgaccgccgctgaactggaacaacagggcgccttccgcctgctggcctccggcctgccgcgcgccgacgggcgcatgggcagcttcggcctggcgatgaccgcgctgccggacggcgatttcctgctgctggcaaccgagcgcagcctgctgccgttcaccctggcctcggcggaagagatccaggatcacgactgccggctgctcacgccgccgccgcgcgcctgattattttttgcctttcatctcccgcaggatctgcccgcacgggttctcctcgccgccttcactgggcgagaccagcgccagcagcgccgccgcaggcgtcagcactgcccctaacgccaccgccgccgcgccgcgcgcgatcagcggcccggctttgaccccggcgtccgggtgcttgaaggtgcctttcacgtacagcggcgaacgcagagtcagcacgcgcatacccttgctttccggatcgatggacaaatccagccgttcggtggcgaggttggtgttgccagtgatgttgatcaccgcgttttcggtgtcgaacacaaacagtcgcggcgcggcgacgccgctgcggatgccgacgtccgccgccgcgcagttgatgcccaccacgtcgtcaccgaacagctgcgccaccagatagttaccgacgttcagaccgaggatctccatcaggctgcggctgatcaccccgttattgatcagcaggcgcaggtcgccgttgctggtcgccagcagctcggccaccgaattaccgctgcccgtcaacctggcgtcgccgttcatctgcccgaggctgcgcttcatcgcctccacgttcggcaacagctgtttaagctgaagtttgcgtgcatgcatatccacctgcccgcgcatcggctttttgccgccgtcgaggcgcacgacagcgttcaggctgccgcccgccatgccgaagcgcagcggatccaggcgcagttcgccattgttcagcttcaggtgcgtggccagatcgctcagcggcaaatcgctgccgcgttcaatgcgcgcggcggcaaacttcacgtccgcatccatcttgctccagctttgcgtatcgaactgttcgaccggcagcaccttatccgccggctgacggcttttctcgccgcgcccggctttggcggcgttggagtccgcgccgatcagcggcgccagatccgccaatctcagctgccgggagttcaccgcgccgctcaacgtgggccgcggtttaccggcaacgtacttcaagctgccgtgaatgtcgctgtcgccgatttttccgtcgaatttctggtactcaaacaccgcgccgcccggctgatgcaggcgggcggtcagatggccatcggtcgcatacggcggggtattcggcaacaacacgccggtcaggccatagaggttgctcaggctttcaccggaaaatttcagctgtacatccaggccgccgaggttcagcggatcggacaaggtgcccgcgaccaccacccgggtgctgccggagcgcacatcggcctgcagcgggaagggcaaatcggcgctctgcagcgacagcatgccgccaatcttgccgctgccgctcaacggctcgccgttatatttgcctttcacctgccagccgaaaacgtaatcgggggtggcggccttgtcgccgccctgtttgccggtcacttcactgaacggcaacggtttgccgagcggatcgatgacggcgcggaaatccgccttcagcgtggcgtctttaaaggcgatctgccccttgtcgaatacgatgtcatgaacggtgaacgaccagtcggaaggcggctgcttgggatcctggccggcggccaggtcaaacgtccagttgttgtcgccgttggccaggcgttgcaacgaagcattcggctgcttcagccagatacgcgggatcagcagctctttacccagcagcgccagcggcgcaatgctggcgtcgacgcgctgcagcgtcaccatgctgtcgccgggcatgtttttcggattacccagccacacgtcttcggcgtgaatatgcggccagggcacccaggcgcgccaaccgccctcatccggattgcgcgaccagtcgacgcccagatcgccgcgaatggcaaacggtcgccgcagttcggccgacactttgtcgttgatggtgggcttgagtcgattccagtcgaaggtcgcgatgaagatcgccagcgcgacgatcagcagcagcacaatgccgcccagccagctgaaaacctttcctgttcttgtcatagcggctccctcagcgcataaatcgggctgccgaatgaaaggaaaaggagttagcagccccgtttaagcctagctgaggataggccggagttcacgccggcgcgccgggcgcggcgaacagcgtcggcacgctgtgcagcgtttcaaagcacgccgggcgggaaaggtagtagccctgggcggccaacgcgccggaacgctgcaccagccgccactcttgttcggtttccacaccctcgacgatcaccccgtcgctgtgctggttcatcatcttgatcagggtgccgagcagctggacgccctcttccgactgtttgagcaaggtaaacaattcacgcgccaccttgatgtattgatagcgccaggcgccgacggcggagaagttggccagcccgctgccgaaatcgtccagccacagccgctcgccgccgacgatctgctgcagcgggcggtttgacgccgttgcggcgtgctccaccagctcgaagcgcagatagggcatctcggcgatctgccgttgcaaggcgctatgacgctgtaatgcttgcagcgcgatgccgtcgatattgaccgacaccatcaccgcatggcgggtgaacaacgcctgccagcgctgcaacagcgccagctgttcctgaaccacccgcaaacgctgggcgacgccgagcgaggcaaaatagtgttccggggattgccgcttgtccggctcattcgggtgatataccgccgtcagcagttccaccgccaacagcgcgccgctggtgcgataaatcggctggaaggtatacaagcgccggcattgccgccagtagcgccgcgatttggcgcaggcatagagggcaaaacagggcgccagcagacccgagatcagattggttatcatcggtactatcgccgtggcggggaagtgagagcgctgccgctgtttctttacccaacttatcggccacgccgcgtaaaactttaagcacgaattgccgcacgctttcctcttcaccctgttggcgttggccgatcgcgatcataaaaaattaaaacaccattttaatttattgactctcttaccgccttgcgtggagactggtggctgttgcttcttctttagccagggcttattgacgatgactatccgaaacctcgccgtgatcggcgaatgcatgatcgagctgtcgcagcagggcgcacagctgacgcgcggctttggcggcgataccctcaacaccgccatctacctcgcccgccaaatgccgaaacagacgttgcaggtgcattacgtcactgcgctcggcaccgacagcttcagcggcgagatgctgcaggcctggcggcaggagaagatcgagaccgggttgattcagcaattcgacaacaagctgccgggcctgtacgtgatcgaaaccgacgccgccggcgaacgcactttctactattggcgcaatgacgccgccgcccgctattggcttgctggaccgcaggccggcgcactgtgcgcgcggctggcgctgttcgattacctgtacctcagcggcattagcctggcgatcctcgcgcctgccgaccgcacgaagctgctggcgttgctgcgccgctgtcgcgccaacggcggcaaggtgatcttcgacaacaactaccgcccgcgcctgtggccaagccgtgaggaaacgcagcaggcctaccgcgaggtgctggcctgcaccgacatcgcctttttgacgctggatgacgaagaattgctgtggggagcgcagccggttgaacagatagtgacgcgcacgcaggcgctcggcgtcggcgagatcgttatcaaacgcggcgcggatgcctgtctggtgttcaatgtggagggggagcggcttgaggtgccggcgatcgcgctgccgccggagcgcgtggtggataccaccgcggcgggcgactctttcagcgccggctacctggcggtgcgcctgaacggcggcggcgcccagcaggcggcgcagcgcggccaccagcttgctgcaacggtgatccaacatcgcggcgccatcattcccgcagcggcgatgcccgcataatcaataaggcggcggcgaagtcacccccgccgcccacgcaatggatcccagaagcattgatcagaggatgattgaaagaatttccctggcgttggcttatttccgcccagagctgctaagctcgggtcttggcattgccgtctttttgaatttattagccgagtataaatttcaatccgccgcactgactagctggactttggtgcaggtcgggttgagccgccgaacgacagggaggttaccgatggccgccacattcgccaacgccgtcgccgcaagactgcatcttgacggccggctacaggccttcagccaattcaaatacgcttacctgaccttcaacaaacaccatcccgatcgccatttgctggtatcgaactacccgcaagaatggctggacatctacagtgccaatcgctatcagcacatcgatcccgtcgtgcgcgccgcccatagccgctgtgcgccctttatgtggcacgacaccgccctcactaccgaggatcggcattaccggaagatcttcagccaggcgcgggagtacgacatcgtgcacggttgcagctttgttttgcacgatcacgacaacaacctggcgatcttgtcgatcagcgcgacggcggccgatgacgccgaactgcggcagctaatggcggaagaaagggccagcctgcagatggtcttggtcgatacccaccagcacgcgtttgcgttggccagcgccgaggctggccgaaaggatcggctctcgccgcgcgaaggggaaattctctattgggccagccagggcaaaacctataacgagatcgcgctgatcctggggatcaaaaccggcacggtgaagtttcacatcggcaatgcggtgcgtaagctgggggtcgccaacgccaaacacgcgatccggcgcggccttgaacggcaactgatcgcgccgccgcaggcataaaaaagccggcattgcagccggcttttgttttttatcttgcggaaaatcagcccgcaacggcgatacgtttcatgtcggtcatgtagccacgcagtttgcggccgacggtttcgattgggtggctgcgcaccgcttcgttcacgtcgcgcagctgcgcgttgtccaccgccgtacccgccacggctttgcccaaatcgcccgcctgcagggtggtcatgaagtccttcagcaacggcaccgctgcgttggcgaacaggtagttgccgtactccgcggtatcggagatgaccacgttcatttcatacagacgcttacgcgcaatggtgttggcgatcaacggcagctcgtgcagcgactcgtagtaagccgactcttcaatgatgccggcatcgaccatggtttcgaacgccagctcaacgcccgctttcaccatcgccaccatcagcacgccatgatcgaagtactcttgctcgctgatcttgccttcaaactgcggcgcattctcgaacgcggttttgccggtctcttcgcgccaggtcagcagtttcacgtcgtcttccgcccagtcggccatcatgccgctggagaaggcgccggaaatgatgtcgtccatgtgcttctggaacagcggcgccatgatggttttcagctgttcggacagcgcataggcacgcagcttggccgggttggacaggcgatccatcatcagggtgatgccaccctgcttcagcgcttcggtgatggtttcccagccgaactgaatcagtttctcggcgtaagccggatcggcgccttcagcaaccagcttgtcgaagcacagcagagaccccgcctgcagcatgccgcacagaatggtctgctcacccatcaggtcagatttcacttcagcgacgaaggaggattccagcacgccggcgcggtggccgccggtcgccgccgcccaggctttggcgatcgccatgccttcgcctttcggatcgttttccgggtgaaccgcaatcagggtcggcacgccgaagccgcgcttgtactcttcgcgcacttcggtacccgggcacttcggcgcgaccatcaccacggtgatgtctttgcgcacctgctcgcccacttcaacgatgttgaagccgtgggaataccccagcgccgcgccgtctttcatcagcggctgcaccgcacgcaccacggaagagtgctgcttgtccggggtcaggttaaccaccagatccgcccgcgggatcaaatcttcgtaggtgccgaccttaaagccgttttcggtcgccttgcgccaggaagcgcgcttttcgtcgatcgcttctttgcgcagggcataggcgacatccaggccggagtcacgcatgttcagcccctggttcaggccctgggcgccacagccgacaatcaccacttttttacctttcaggtagccggcttcgtcagcaaattcgtcgcgcgccataaagcggcatttacccaattgcgccagctgctgacgcaggttcaatgtgttgaaatagttagccatggtggtactccggtttgatgttgtcttgcattgttattttcattccccgccctgtctgtgcggagattcgttaaactcaatgtataacaggaaatgcgttgcttaaattgatatattgagaacgtgatattgcaatttttgcaacactctcactgcgagcgtatcgatatggatttacgtgatttaaagctgttcctgcatctggccgaaagccatcacttcgggcgcaccgccaaggcgatgcacgtcagcccgtcgacgctctctcgccagatccagcggctggaagagatcctcgggcagccgctgttcctgcgcgataaccgcaccgtgcagctcaccgacgccggcgaacagctgaaagaattcgcccagcaaacgctgctgcaatatcagcagctgaagcactcactcggccagcacggcccttcgctgagcggcgaactgcggctgttctgctcggtgaccgcggcgtacagccacctgccgccgatcctcgatcgcttccgcgcgcagcacccgctggtagaaattaagctaaccaccggcgacgccgccgacgcggtcgacaaggtgcagtccaacgaggccgatctcggcatcgccggccggccggaaacgctgcccgccagcgtggcgttcaccaaaatcggtgaaatcccgctggtgctgatcgcaccggcgctgccctgcgcggtacgcagccaggcgtttgccgacaagcccgactgggccgagatcccgttcatcctgccggaacacggcccttcgcgaaaacgcatcgagctgtggttccgccgccaccgcatcagcaatccgctgatttacgccaccgtcggcggccacgaagcgatcgtgtcgatggtcgctttgggctgcggcatcgcgctgatcccgagcgtggtggtggataacagcccggagccggtgcgcaaccgcatctcgcagctggataacatctcgatggtcgaacccttcgagctgggggtctgcgtccagaaaaagcgcctcagcgatccgctgatcgacgccttttggcggttgctgcatccccgctgacgcgaggtttacagatccgccggatcgatctgcttcatcgtctctacctgcatcagccagtggtagagcggctcaagctgcaaaaatgccccggccagctgcggcgccagatcggcgctgaacagcttttccacttcgctgtcggtcaccatcaccgcaaacgacttgcggttataccaggtggcgatctccgccgcctgctccttcaccagcgggcgcttgtagctttcgcccaccagctcgaacggcggccggcagcaggcggccacctcaaggaaaggctgcggccgctgcctcagcgtatggcggaacagatccatggtcggcttgttggcgctgtagtagccgagcccatagcgcaacatgtccggccccagttcaaaaaaatacaccggcgcatctttccagtctttgctcgggcgcttgaacgtcagccacatgcggctgcggtagcgcgatttatcatgagaaaagcgcgtatcgcgatgaatgcgcgacagcgttttgccgatcgccgggcgagtctcgaactgcggatcgatcgccaacatgccgggagccagctgctccaccagcgcgcggaacggcgccagcagctcgcgatcgtagatgtcgcggttgccgtcgaaccacgccttatcattctcaatccgcacctgctgcaggaaattcaggccctgctgactaaagccggagaagggttgcgtcataagcttttccgttctgacgatttatcgggtgttgcgcagatcttccctctgccaacggcgtttgataaacacgcgccgacgcgtgcgaaaataagcgacatacaggtagaacgccgcccgattgctgaatagcgcaccacccaccgcgccccccagcaacatggcaccggtggcgatgccggtcatgcccgtcgcccacgctactgcggcgccaaggcaacacagaccgagcatgccaagatagtattgcagcaataccactccgctgtttttcccctgcaccagttggaacaggatcagcgtcatccacaccgccacgatcgcgccgctgcccatgagaacggcggcggaagtcttgccgctccaggcggccgccacgtccgtggccaggcccatcacgcccgccagccccagcgtcaggcataccatcagcaacatgacattgccgacgcccggcggtgacagccgctggcccggcgtcaggaaatgctgctcaagctgcgcatccacgccggcgaaaagcgcgcgatcgcgcgccgcgatttggctttccatctcccggccctgcgcgatcaggcgtttaatcatccagtccgccattacctcaccatctgcggcaatttctgcataatgcccacaaaatactgcccggtggttttcacattcaccggcgcagacagggtgccgctgatgccgctgcccacgaacgttaacgcgttattgagcgccgaatgcaattgctgacgcagcccgttttggatcgcttccgtcgggtaacgcttcgggtataagccgttcttcaccatttctttcaagacgttattggaaatccccggattttccgctcgaatgatgttttcggtcagccgcttcctttcgctgcggggcatgcttttcagccattccgtcgccttgcgcgccgaaatgcggcgcatggcgcggtaggtcatcgtcgcttccttcagggcggctcccgcgctggccagcgagatcacatcgagtacggtgctggtggcgatataccactgctcagagtcgagctgcgccaattcatcgcctttcccgtcatacagcttgttgacacggtatagcccattgccgcactgcagcgcgctggcggccatgccggcatagcccagataagccaccgcagagctggtgccgccggtgaacggcacggcgacgctgcccgacgccagtaaaaataccgataccagcagcgttccgcacgacagcgcggccgaggccaactctttgctgacgctgggtttgctcaacgcttccgacagcgtattggtcgcggcaacgcgcgaggtatgagccaccgttttgctgatgaccacgtgcgtgacctgcgaagcgttcgaataaccggtgtgctgcgtcgggcggactaaaaatgagttttgcccgtcggaaaaaataattcccacgccatgaaaagcgaggctgcagtccagcgagtcctgcaaggcttgcagattaatatcgcgatagaattcttgtaccccggcattgcccaacaggcgggcaaattcggcgttggtcaaatcgtcttcgggagaaccgaacggcgtagaaaaagcggttttcattgtcgtgcatccctatacgtcagaagtcttggcagtataaaaatgcacgacaaaatcacaaccatgcaacccataaactgactaacgcgtcacggttgcttatcaatccggctcatccctgcaaaaagaagcggaacgccgggttgtcggtttcgtcgtggcaatcgtagcccagcgcctgcagatgccgctcgaattccggctcgctttgcgccagctcgaaggccgccagcacccggccgaagtcggtgccgtggctgcgatagtggaacagcgagatgttccagtgcgtgcccagcgtctgcaggaacttcagcagcgcgcccggcgattccggaaactcaaagctatacagccgttcgcgcagcggcttcgacggacgcccgcccaccatgtagcgcacgtgcagtttagccatctcgtcgtccgacagatccaccacctgataaccgtcggcgttgagttcgtcgatgatctcccgccgttcggcgtggccgcgcgtcagccgcacgccgacgaaaatgcaggcgttgtcggcatcggcgtagcggtagttgaattcggtcaccgagcggccgcccagcagctggcagaacttgaggaagctgccctgctgttccggaatggttaccgccagcagcgcttcgcgctgttcgcccagttcgcagcgctcggaaacgtaacgcagcccatggaagttgaggttggcgcccgagagcacgtgcgccagacgctcgccctgaatgttgtgctgctggacgtactttttcagccccgccaacgccaacgcgccggaaggttcggcaatggcacgcacgtcctcgaacagatctttgaccgccgcgcagatagcgtcgctgtccacggtgatcacgtcgtccagatactcacggcacaggcggaatgtttcgtcgccgatgcgcttcaccgccacgccttcggcgaacagcccgacgcgtgccagatccaccggatggccggcatccagcgccgcgcgcagacaggcggagtcttccgcttcgacgccgatcactttgatctgcggcatcagctgtttgatcagcaccgccaccccggcggccaggccgccgccgcccaccggcacgaaaacccgatccagatgcgcgtcttgctgcagcagctccatcgccagcgtgccctgcccggcgatcaccgtcgggtgatcgaacggcggcacgaaggtcatgccctgctgttgggaaagttcaatcgccttcgccttagcctcgtcgaaattggcgccgtgcagcaacacttcgccgccgaaaccgcgcaccgcatccaccttgatgtccgcagtggacaccggcatcacgatcagcgttttgatccccagccgtttaccggagaaggcgacgccctgcgcgtggttgccggccgaagccgtcacgacgccgcgcgccttctgctcttcgtccagcccggcgatcatcgcataggccccgcgcagcttgaagctatgcaccggctggcgatcttcgcgcttcaccaaaatggtgttgccgagacgcgaagagattttgctcatggcctgcaacggggtgacttgcgccacctcgtaaaccggcgagcgcagtaccgctcgcagatattccgcgccgcagggggcgctgggtaggggttgagagaccgccatgctgcttatccccccagtttgctcttgtcgcgcaccgcgcctttatcggcgctggtggccaacgaggcgtaggcgcgcagcgcgaaggacacctgacgctcacgatttttcggcgtccaggccgcgtcgccgcgcgccagttccgcctcatgccgcgccgccaactcctgctcgctgacatccagctggatgccgcgatgaggaatgtcgatcgcgatcatgtcgccgtcctgcaccagggcgatcaggccgccgttggccgcttccggcgaagcgtgaccgatggacaacccggaggtgccgccggagaaacgcccgtcggtgatcagcgcgcacgctttgcccagccccatcgatttcaggtaggtggttgggtaaagcatttcctgcatgcccgggccgcctttcggcccttcgtagcgaatcaccactacgtcgcccgccaccactttgccgccgaggatcgcttctaccgcgtcgtcctggctttcatacactttggccgggccgcggaaggtgaggatttccttgtcgacgccggcggttttgacgatgcagccgttttccgccaggttgccgtacagcaccgccaacccgccgtcctgactgtaggcgtgctcacgggtgcggatgcagccttccttgcggtcggtgtccagcgaatcccagcggcagtcctgagagaatgcctgcgtggtgcggataccggccggcccggcggagtacattttcttgacgctttcgtcgcgggtcagcatcacgtcgtaggcctccagcgtctgcggcagggtcagccccaatacgttgttcacctcgcggttcagcaagccggcgcgatccagctcgccgaggatgccgattacgccaccggcgcggtgcacgtcttccatgtgatatttctgcgtgctcggcgccaccttgcacaggtgcggcactttgcgcgacaggcgatcgatgtcttccatggtgaagtccacctcgccttcctgcgccgaagccaacaggtgcagcacggtattggtcgaaccgcccatggcgatgtccagcgtcatggcgttttcaaatgccgccttgttggcgatattgcgcggcagcgcgctctcgtcgtcctgctcgtaatagcgtttggtcagctcgacgatgcgcttgccggcgttgaggaacagttccttgcgatcggcgtgggtggccagcagcgaaccgttgcccggctgcgacaggcccagcgcttcggtcaggcagttcatcgagttggcggtgaacatgccggagcaagagccgcaggtcgggcaggcggaacgctcgatctgctcgctgtcggcgtcgctgacgttcgggttcgcgccctggatcatcgcgtccaccagatccagcttgatgatctggttggagagtttggttttgccggcttccatcgggccgccggagacgaagatcaccggaatgttcaggcgcaacgccgccatcagcatgcccggggtgatcttgtcgcagttggagatgcacaccatcgcgtcggcgcagtgggcgttcaccatgtattcgaccgagtcggcgatcagctcgcgcgacggcagagaatagagcatgccgccgtggcccatggcgatgccgtcatccaccgcgatggtgttgaactctttggccacgccgcctgaagcttcgatctgttcggcgaccagtttgcccagatcgcgcagatgcacgtggcccggcacgaactgggtaaaggagttgaccacggcgatgatcggcttgccgaaatcggcgtcggtcatcccggtcgcgcgccacaatgcgcgggcacccgccatattgcggccgtgggtggtggtggcggaacggtacttaggcatgctcttttcactccaaatgtatttatggcaggcggcgaacgaaccgcctggatatttcttatcttgtctgtcttgtcgtccgccacgctgcgcggcgagccttgtcgttacgggtttaccggatccagccaaccgtacttgtcttcggtcttgccggtgaacaggccgaagaacgcctgttggatctgtttggtcaccgggccacgtttaccgataccgacctgaatgccgtccacgctgcgcaccggcgtgatctccgccgcggtgccggacatgaacacttcatcggccaggtacagcgattcgcgcgacagcacctgctcgcgcacctcgaagcccatgtctttcgccagcttgatgatcgcatcgcgggtgatgcccggcagcgccgacgaggtgaacggcggggtgtagatcacgccgtctttcacctggaacaggttctcgcccgccccttcggaaatgtagccgtgcacgtcgagcgcgatgccttcctgatagccgtggcggcgcgcttcgctgcccaccagcagggaggaaagatagttgccgccggctttggccgcggtcgggatggtgttcggcgccgcgcggtgccaagaggagaccatcgcatcgataccttgctccagcgcctcttcacccaggtaagcgccccaaggaaacgccgcgataatcacgtccgttttataaccggccggcgggttgacgcccatgccgacatcaccgacgaacaccagcgggcgaatgtaggcgctgaccagattgttcttgcgcagcgtggcgcggcaggcttccatcagttcgtcgacgctttgcgaaaccggcatgcggtagattttcgccgagtcatgcaggcgctgcatatgctcgcgatggcggaacaccaccggccccaagtgcgagtcgtagcagcgcaccccttcaaataccgacgtgccgtaatgcaacgcgtgcgacatcacgtgcactttggcctcggcccaaggaaccatctcaccattgaaccaaatgtaatcggctttcttagtcattgttatttatccttctcggcgcctcaggcgcgtatttgttgtgatgttggctgctggatctcgacgcaggagacgtccatcagtttacttaattgagatgacaacaaggcaaccgggcgcgggctggcaacggtcaattcgatattgatgctgtcggcgttggccggggaaaccatattcatagcacaaacctgaaagccgcgatgacgcacgacccgcaatacgcgctctaacatttcggggcgaaaacgcgcctggatcgagagttgatgctgcatcatgatatttcctccaacatggtttcgttgccggcgcccggcggcaccagcggccagacgttttcgagttcgtcgatagagacctgcagcagataagggccttcggtgttgaacagcgcctcgagggcgccctccacctgatccttgcggctgatgcgctggccgggaatgccgaaggcggcggccaacatcaggaagtcggggttatcggacaggttggtttcgctgtagcggccgtcgaagaacagctgctgccattgacgcaccatcccgaggcgctggttgtccagcagaacgattttgagcggcagctgcttgcgcttgatggtgcccagttcctgcacgttcatcatgaaggagccatcgcccgagacgcagatcaccgtatcttgcgggcgggcaatctgagcgcctaccgcggccggcacgccgaatcccatggtgccgaggccgctggaggtgatgaaattctccggacgctcgaacgtcatgtgctgcgcgctccacatctggtgctgaccgacgtcggtggtcactacgctgttggccggcttgcgcgcggacagctggcgcaagaacagcggcgcgtagatcggctggccagggtgatcgtagcggcaggcgtgctcggctttcagcgccgtcacctgctgctgccaggcggcgatgtccagcgggcgctgcaacgccggcagcaatgctttcagatcgccctgcagggccacatgcgcctggcgcagcttgctcatttccgccgggtcgatatccatgtggatcactttggcgtgcggcgcgaaggcgttcagcttgccggtcacgcgatcatcgaaacgcgcgccgacggcgatcagcagatcgcattcctgcaccgccaggttggcggccttggcgccatgcatgcccagcatgccgaggtacagcggatcttgcgcatccggcgcgcccagccccttcagggtggcgacgttcggcatgcgggtcacggcgataaattcacgcagcgccggcaccgcctgcgccatgcccacgccgccgccgacgtacagcatcggtttgtgcgcctgcgccagcagcgcggccgcctcggccaacgccgccgccgggaacgccggcgcttcgtcaaccggcatcagatgcgggtgcaagtccccctgcgccagctggatgtctttcgggatatcgatcagcaccgggccgggacggccgcctgcggcgatggcaaaagcttccgccatgatgcccggcaaggcgtccagcgactccaccaggaagctgtgcttggtgcaggccagagacaggccgagaacatcgatctcctgaaaggcatcggtgccgatcagcgcggaacccacctggccggtgatggcgacaacgggaacagaatcgagcagcgcatcagccaggccagtgatcaggttggtggcgccggggccggaagtggcgatgcaaacgccgaccttgccggtggcgcgggcgtagccgatggcggccatggcggcgccctgttcatggcggcacagcaggtgttccacgccgccgtcatacaacgcatcgtacaccggcatgattgccccgcccggatagccgaatacggtatccacaccctgcgcacgcaacgcttgaactacccactgagcgccattcatggttatttccccgcctttcttcgacaactgcaggattttgttctgtttttcatgctctgccccttgctccacttttctcttgccaataaaaaacccccggacctgacggtgcgggggttctcttgcgattccggcttgtttgctaagcctttcttcgtccaagtgcagccccgcacggtgggataataatcaccaccacgctaatcacgactaggctaatcacttgggcaaaggctttcataatgggtttgttcactgtgctcattcagaactaatgcttacagaggtaccacagccgcgcgcgacatgacaacactttttttgcgttattattcggcgcaatctggtcatacctcacgcgaatcgcccctctttcacacgttggcgcgcatacccggattttctaccgcgtcggtgatcgccttgccgcgcgtatccttgccgaagaacaccaacagggcgatcgccaccgccaccgtaccggcgacgatcgccatcgccagaccgtaattatgcccatgatgctcggcgatggtggcttgcagcgtggcgttgaccgaggcgatcaggttacccagctggtacacgaaccccggcagcaccgcgcgggtgttggccggcaccagctcggtcagataggtcggcaccacgccccaggcgccctgcaccatgaactgcatcaggaaagcgccgatccccaacatcagcgaaccgctggaaaacgcccacagcgggatcaccggcagcgccaacagcgcggcaatgatgatcgcttttttgcggccgatcttttctgacaacgaaccgaagaaaacaccgccgataattgacgcgatattgtagctaatggcgatgatactgacggttttagggtcgaaaccgtgctgaactttcagaaacaccggatacagatcctgcgtaccgtgggagaagaaattgaacgccgccatcagcagcaccagatagcagcacagcttccagtggctcttcaacaccggcagcaaggcggtgctctctttgcgttcacgcgccgccagccataccggcgactcctgcacgcaataataaataaacggcagcagcaggatcggcgccgcgccgatgacgaacatgccgcgccagccgaccgtttcgaacagcaggccgtacaccaccgccgccagcagataaccaaacggatagccggcctggaaaatacccgacatcaggccgcgtgagcggtccggtatggtttccatcgccaacgatgacgccacgccccaaatgccgcccatcgcaacaccgtacaacacccgcaacagcaagaagaccgtcagcgagggcgcggcggcggagagcagctcaaacaccgagaagaagacgatattcaacatcaggatcggtttgcggccatatttttccgccgcacgcccgaagatcagcgcgccaatcgggcgcaccgccagcgtgagcagaatcgccaacgtgacctgttccagaccgacgtgaaaggactgcgcgatatcgctgagtaagaataccagcacgaaaaaatcgaaagcgtcgagcgtccagcttgaaaagctggcgattgccgcgttgcgttgcagcggggtccaaccaaacatagtgttatccctaccgtagagtacgaagtcaggaggtttagcggctgccgggcagaatgcggcggcggtcggggcttgttaaagaagtgatttttcttttaatcaattgttaaatacacccgttaaccctatgattgcaatgtgtatgggccgctaatgtgttgcagccttcagcgaattgttaatgggtattgccgcaggatgcgaggcggctcgcacaatctcatttacttcgatgaaaatgagcaattacgctgcgaaacccctagaaaaaccaccaataacgccgcgcaatgccaggatgaatcacgcatcatgtcgtcctcagcaaggagagcgatatgtcactggcgttaatctatagccgcgccatcatcggcgttcaggccccttccgtgacggtggaggtgcatatcagcaatggcctgcccggcctgacgctggtcggcctgccggaaaccacggtaaaagaggcgcgcgatcgggtgcgcagcgccctgatcaacaacggtttcacctttcccgcccggcgcatcaccgtcaatttagcccccgccgatctgccgaaagaaggcgggcgttacgatctgccgatagcgctggcgatcctcgccgcctccgagcagttacccctcgcaccgttggcacgctacgagtttcttggcgagctcgcgctgtccggctcactgcgcgcggtcagaggtgccatcccggcggcgctggcggcggctgatgccgggcggcaactgatcctctcgacggacaacgccgccgaagtcggcctgatcgcgcagtcgcactcccatactgcccaacacctgctggaagtctgcgcttttctgctcggccaaggcgaactgccggtggcggccgcgccccccgatgcagacaacgcgtgcgaaaacgccgacctgcgcgacatcatcggccaggaacaggccaagcgggcattagagatcgccgccgccggcgggcataacctactgttggttgggccaccgggcaccggtaaaaccatgctggccagccgtctcacgggcttactgccgccgctgacggagactgaggcgctggaaagcctggcggtcgccagcttgcagcatcatattcccgccgctctaccatggcgtcagaggccgttccgcgcaccgcaccacagcgcctcgatggcggcattggtcggcggcggctcactgccgcgaccgggcgagatctcgatggcgcataacggcgtgctgtttctggatgaactgccggaattcgagcgtaaggtactggatgcgctgcgtgagccgttggaatccggcgagatcgtgatttcacgtgccaacgccaaggtctgtttccccgccagggtgcaactgatcgcggcaatgaaccccagcccgacagggcattatcagggattgcacaatcgcgcctcaccgcagcaggtgttgcgctatctggcccggctgtcagggccttttctcgaccgtttcgatctgtctatcgaagtaccgctgttgccgccgggtacgctcagtcatcggaaaccccagggagaaagcagcgaacaagtacggaaaagggtgcagcaggctcgcgcccggcagctcgaacgcgccggtaaagtcaatgcgctgttgagcaaccgcgaagtggaacgagattgcgttttgcaggcggctgacgccgagtttttggaagcaacattaaacacgctggggttatcggttcgcgcctggcagcgcatcttgaaagtggcgcgcacgctggcggatttggcgggagatgctgaactcgacaggcaccacctcagcgaagcgctgggctatcgcagtatggaccgcctgctgttacaactgcatcgcagtctggaatgaaaatggggcccgcaggccccatcgtctttagtcttcgctgtcgctgtaatcttctactgcgtcagcctgcggtttaccgccggacagagtatggaatttcttcgggcgacgtgtgcgcgccagatatttagcccatactttttcctgctcggtagccgcttcgcgctcaccgcggcacactgcgacgaacagctgttcttcttcagtggccggctggcgtttacccgagtccaactcgttaaacgcgtagccgaagcgctctagcaattgcgcctctttaatggtgaaatcgccgtgacgggagaacccgcgagggtaatgtttattatcaaaaaaacgattggtcgtggtgaagctatccgccatctgacacgctcctaattctcttatggccgtgctgtttatggcgcggagtattagataggcttgacagcgtgtaaaacaaaacatttaaatcttaacgacaaatttttttggagataggtgtggataccgaattactgaaaacctttttggaggtcagtagaacgcgtcactttggcagagccgcagaatctttgtacttaacgcagtccgcggtcagtttccgcatccgtcagttagaaaaccagttaggcgcaaatttatttacccgtcatcgcaataacatccgcctgacgcctgccggcgagcggcttctgccctatgccgagagcctgatgaacacctggcagttggcgaagaaggaagtcgtgcgttcgctgcaacacaccgagttatcgatcggcgctaccgcttcgttgtgggaggcctatctgaccccctggttgcaagcactctatcaacaacgcgaggcgctgcagctagaagccagggtggcattaaggcactctttggtaaaacaactgcatgaaaggcagctcgatttactgatcaccactgaaccgccgaagatggatgaattggccagccagcaactgagcaatttctcattacgcctgtactcatccgcttatcgtgacaaacaggccccaatgccctacatcaagctggaatggggagccgacttccaccaacaggaaaaccgcatgttggaaggtgataacgtaccggtgcttaccaccacctccgctcacctgacgcgtcagctgttggaaaccacgggcggatgcgctttcctgcccagccattgggaaaaagagtacccacagctggtggccgccagcgagatcccgccgattatccgcccactgtatgccgtctggttgcaaaacagcgatcaacagcctttgattcgacaattacttaaaatacctttaaataccgcagcctaaagcgctatggcggccttaaaagccgccaccgtggtcttggctgtctatcatgccaaaagccgcccatcgccttctgagagaagaaaatgcaaaatgtcgggagaatcaggagctccgcggaggtaaagatcgaaaggttatggagcaattcggatcagataaacatcagcatagaacagccgatgcgctcttttccaaaacgataacgcgctaaggaaagggataataggtaaaaaaaaaccctttgctttcgcaaagggttcttaatatggcaggggcggagagactcgaactcgcgacacccggttttggagaccggtgctctaccaactgagctacgcccctaaatctcgcttaacattatgcctgctaataaagcaggcataattaaataagtggcggaacggacggggctcgaacccgcgaccccctgcgtgacaggcaggtattctaaccaactgaactaccgctccaccgattcttttacgttgtatctttcgataccggcaatatcgcgctctgcgacttgcgcattaccagtcgtcacactgataacgtttatttgatgcctggcagtgtcctactctcgcatggggagaccccacactaccatcggcgctacggcgtttcacttctgagttcggcatggggtcaggtgggaccaccgcgctattgccgccaggcaaattcgttttaatcaacccgcttcatcgctgaagcctgtcaatccaatctgtaaacaagctgaatattgtcttggtctcaccaaaacaccttcggtgttgtaaggttaagcctcacggatcattagtactggttagctcaatgcatcgctgcacttacacacccagcctatcaacgtcttagtcttaaacgttccttcaggggccttaaaggcccagggaagactcatcttgaggcaagtttcgcgcttagatgctttcagcgcttatcttttccgcacttagctaccgggcaatgccattggcatgacaacccgaacaccagcggtgcgttcactccggtcctctcgtactaggagcaacccctctcaatcttccaacgcccacggcagatagggaccgaactgtctcacgacgttctaaacccagctcgcgtaccactttaaatggcgaacagccatacccttgggacctacttcagccccaggatgtgatgagccgacatcgaggtgccaaacaccgccgtcgatatgaactcttgggcggtatcagcctgttatccccggagtaccttttatccgttgagcgatggcccttccattcagaaccaccggatcactaagacctactttcgtacctgctcgagccgtcactctcgcagtcaagctagcttatgcctttgcactaacctcacgatgtccgaccgtgattagctaaccttcgtgctcctccgttactctttgggaggagaccgccccagtcaaactacccaccagacactgtcctcaccccggatcacggggccgagttagaacatcaaacattaaagggtggtatttcaaggatggctccacgcagactggcgtccacgcttcaaagcctcccacctatcctacacatcaaggctcaatgttcagtgtcaagctatagtaaaggttcacggggtctttccgtcttgccgcgggtacactgcatcttcacagcgagttcaatttcactgagtctcgggtggagacagcctggccatcattacgccattcgtgcaggtcggaacttacccgacaaggaatttcgctaccttaggaccgttatagttacggccgccgtttactggggcttcgatcaagagcttcgccttgcggctgaccccatcaattaaccttccagcaccgggcaggcgtcacaccgtatacgtccactttcgtgtttgcacagtgctgtgtttttattaaacagttgcagccagctggtatcttcgactggcttcagctccatccgcgagggacttcacctacatgccagcgtgccttctcccgaagttacggcaccattttgcctagttccttcacccgagttctctcaagcgccttggtattctctacctgaccacctgtgtcggtttggggtacgatttaatgttacctggagcttagaggattttcctggaagcagggcatcaactacttctgcaccgtagtgcatcgtcatcacgcctcagggttaatatgcaaccggatttaccaggtcacaccccctacacgcttaaaccgggacaaccgtcgcccggccagcctagccttctccgtccccccttcgcagtaacaccaagtacaggaatattaacctgtttcccatcgactacgcttttcagcctcgccttaggggtcgactcaccctgccccgattaacgttggacaggaacccttggtcttccggcgagcgggcttttcacccgctttatcgttacttatgtcagcattcgcacttctgatacctccagcaaccctcacaggccaccttcaacggcttacagaacgctcccctacccaacaacgcctaagcgtcgctgccgcagcttcggtgcatggtttagccccgttacatcttccgcgcaggccgactcgaccagtgagctattacgctttctttaaatgatggctgcttctaagccaacatcctggctgtctatgccttcccacatcgtttcccacttaaccatgactttgggaccttagctggcggtctgggttgtttccctcttcacgacggacgttagcacccgccgtgtgtctcccgtgataacattcttcggtattcggagtttgcatcggtttggtaagccgggatggccccctagccgaaacagtgctctacccccgaagatgagttcacgaggcgctacctaaatagctttcggggagaaccagctatctcccggtttgattggcctttcacccccagccacaagtcatccgctaatttttcaacattagtcggttcggtcctccagttagtgttacccaaccttcaacctgcccatggctagatcaccgggtttcgggtctataccttgcaactaatcgcccagttaagactcggtttccctacggctcccctatacggttaaccttgctacaaaatataagtcgctgacccattatacaaaaggtacgcagtcacaccacgaaggtgctcccactgcttgtacgtacacggtttcaggttctatttcactcccctcgccggggttcttttcgcctttccctcacggtactggttcactatcggtcagtcaggagtatttagccttggaggatggtccccccatattcagacaggatgtcacgtgtcccgccctactcatcgaactcacgacctgtgcattttagtgtacggggctatcaccctttactgcgcgactttccagacgcttccactaacacacaagccgattcaggttctgggctcctccccgttcgctcgccgctactgggggaatctcggttgatttcttttcctcggggtacttagatgtttcagttcccccggttcgcctcatgccactatgtattcatgacatgatagtgtgtcgaaacacactgggtttccccattcgggtatcgccggttataacggttcatatcaccttaccgacgcttttcgcagattagcacgcccttcatcgcctctgactgcctaggcatccaccgtgtacgcttagtcacttaacctcacaacccgaagatgtttccatcgttcgcgctgcaaacatttgagagactctatgacaggttactctttatcccaatacttctacggagggataaatttcagccgtcatgtttcaattttcagcttgttccagattgttaaagagcaaaatacttcgcagcatactgtcgccaatatactctgaagtattgaaataccggactatatggtggagctaagcgggatcgaaccgctgacctcctgcgtgcaaggcaggcgctctcccagctgagctatagccccatacagtcacgcgcagtaccttttccacttcataagaagtggtaggcctgagtggacttgaaccaccgacctcacccttatcaggggtgcgctctaaccacctgagctacaagcctataaaggtatttctgctcgttactttctatcagacaatctgtgtgagcacgccacgcgaactaatatctttaggtaaggaggtgatccaaccgcaggttcccctacggttaccttgttacgacttcaccccagtcatgaatcacaaagtggtaagcgccctcccgaagttaagctacctacttcttttgcaacccactcccatggtgtgacgggcggtgtgtacaaggcccgggaacgtattcaccgtagcattctgatctacgattactagcgattccgacttcatggagtcgagttgcagactccaatccggactacgacgtactttatgaggtccgcttgctctcgcgaggtcgcttctctttgtatacgccattgtagcacgtgtgtagccctactcgtaagggccatgatgacttgacgtcatccccaccttcctccagtttatcactggcagtctcctttgagttcccggccgaaccgctggcaacaaaggataagggttgcgctcgttgcgggacttaacccaacatttcacaacacgagctgacgacagccatgcagcacctgtctcagagttcccgaaggcaccaaagcatctctgctaagttctctggatgtcaagagtaggtaaggttcttcgcgttgcatcgaattaaaccacatgctccaccgcttgtgcgggcccccgtcaattcatttgagttttaaccttgcggccgtactccccaggcggtcgatttaacgcgttagctccggaagccacgcctcaagggcacaacctccaaatcgacatcgtttacagcgtggactaccagggtatctaatcctgtttgctccccacgctttcgcacctgagcgtcagtcttcgtccagggggccgccttcgccaccggtattcctccagatctctacgcatttcaccgctacacctggaattctacccccctctacgagactctagcttgccagtttcaaatgcagttcccaggttgagcccggggatttcacatctgacttaacaaaccgcctgcgtgcgctttacgcccagtaattccgattaacgcttgcaccctccgtattaccgcggctgctggcacggagttagccggtgcttcttctgcgagtaacgtcaattgatgaacgtattaagttcaccaccttcctcctcgctgaaagtgctttacaacccgaaggccttcttcacacacgcggcatggctgcatcaggcttgcgcccattgtgcaatattccccactgctgcctcccgtaggagtctggaccgtgtctcagttccagtgtggctggtcatcctctcagaccagctagggatcgtcgcctaggtgagccattaccccacctactagctaatcccatctgggcacatctgatggcaagaggcccgaaggtccccctctttggtcttgcgacgttatgcggtattagctaccgtttccagtagttatccccctccatcaggcagtttcccagacattactcacccgtccgccgctcgtcacccagggagcaagctcccctgtgctaccgctcgacttgcatgtgttaagcctgccgccagcgttcaatctgagccatgatcaaactcttcaattaaaagcttgatttgcttccactcgagaagcgatgctcaaagatttactgcatgaattttacttcagttagtcactcttcaagacttgatattttttgcatccgaagatgctggatatcgtcttgtggagtgcccacacagattgtctgataaattgttaaagagcagtgagttaggcgctttcgcttgctaactcgaggtggcgtatattacgctttcctctttcagagtcaaccctaattttcaggattttttctctgcgacccccggatactctgtcagtcgttgttcccggtcagtggaggcgcattatagggagttctcggcgagccgcaacccctattttcaatattttttccgaccgttgaatgtttaaccaaaacaccgttaaagcggcagttttttcaacgatttaaagccatagccctgcaaaacgggcaataaagcgtcagtatcttcatttaacgccatgcaatacgccagattctcttcctggctcgagaccaggctttcctgcgtagagatgagccaggcggtgcggcgggcaatcgccgcgccggaatccaccaatcgggtgccttccggcaacacctgcatcagctcttcagctaacagaggaaaatgggtgcagcccagcacgaccgtatccggcggctcgcgcatgctcagccacggatgcaggatcttcttcagcaccggcagcggcacggcttcgccatgcagcttggcttccgccagctccaccagttcagaagagcccagcagctcaatcttgcaatcggtggcgaaccgggaaatcagctcatgggtatagctgcgctgtacggtgccgcgggtcgccaacaggccgacaatgccgttgacggtaagacgagccgccggtttgatggcgggcaccacgcccacgaccgggaaactgaaacgctcgcgcagggccggcaaggagaccgtgctggcggtgttgcaggcgatgacgacaatcgccagaggatgacgctgctgcaccgcgccgacaatctccagcacgcgcccaacgataaactcttcggacttctcgccgtaggggaacgccacgttgtcgaacgcgtatatatagtggagatccggcagcaactgccgaatctcctgatacaccgacagcccgccgacgccggaatcaaaaaccagcaccgtcgggcgaggtgtggcggtgctgttagaaggtatagcttccagtgaggtagtattctcttcctggagtagcgtagccataggccgtctcataatctttatcaaacaggttggcaattctaccacgaactgtcagatgagatgtgaccggatacgaaactgcgagatcccacagactcacgccgccaagtttaacgctttgttccggataggtactgtaatccttgtcataacgttgacccagatattgataagtcaccgcccagtcaaagtcatacagctgccagtccagctcatatttcacctgctgcttggcgcgccgcagcagcacttcattggtcttggcgttgcgaggatcgacatagtcataaccaatctgatgcgtcaatgggccggtatcaaacgaggccgtagcttcaatccctttgatggtcgccttacccacgttgtaatagacgtagttggtttcccccgtggaatcgatcaaattgtcgatgtcgttgcgataaccggagatgcgccaggtcaccgggccggtcagcccttcaaagccaccttcccactgcttgctttcttccggtttcagatcggtgttgttaccgaagttgccgtatagctggctcatattcggtgctttgaacgccgtgccatacgacgcgataaaacggtatccctcgacgaactcccaggccgcgctggtttgccaggtgccatgccagccaaactcggaatgatcgtcacctcgaaccgcgccttccagcgttaccgggccaaccagttgctgcgcggtcagataaatgcctgcatcacgttggcttttttcacccttcacggtggtggaatccggtttgattttctgttgctgccagtcgacgccagagcttacggtaccctgtccaacctgcagcgtattgccccactgcaggttgtactgttcggaatccaccaggctggccgagctgtcatgcatgccgaggcgaggatcgtaatcgtaatccttgctatggctgtagctgccaatcacttgtgttgcgtaaatgccttctttatagcgcaatccggtatcccaggtttggctatacagtttgcgcgtatccagcagagagctggtcggtgaggaataataactatcatacgccgtgcggttgtcgtaaccatacccgcgcacaaaaccgctgaccgattcgctgaactggtgctcaagcgcaccatacagcaacttactcataaagccatcgcgatcctgttggctttgcatgccggtgctgccgtaggccaccacgtcataccctttggtgtaggtgtagtcacccgccaccgtcgccacggtgctgtcgcccaactgctgttgagtcgacgcgtcataggattggtagccgttggagccgacgccggctgagagcgtagtaccgttcttttcgcgggtagtaataatgttgaccacgccgccgatggcgtcggaaccgtataccgccgagcgcgggccgcggatgtattcgactttctgcaccaacgaaatcgggatttggctaaggtcagaagagccgctgacgcccgcctgattaaggcgaatgccgtcaattagcaccagcacgtggctggagttggtgccgcgaataaacagcgagctcttttgccccaacccgccgttttggccaacgtccacgcccggcaaacggcgcatcacgtcggtcaggctcttggcctgccagcgatcgatatcgttacgggtgacgatggtggtcggcgccagcacggaagaaaccggctgcgggaagcggttggcggtcaccaccaggttatcgccattcgtggctgtggtgttgtcttgcgcccatccagaaaaagccgtgacggaggagaccaccgccagcagcgtattttttgtaattgtcatgagaaaagcatccaaacttaattggcggatgccgcaggatcatggccggtagttcgcgacggccacggatattgcgacgtaacaccggcaggtcttcgggcttgggatttgcgggccgcggggcgcgaccggcaacgggcgatgacttcccatcctgcagtggacagtgtctgcgtcaaaacgctatcgccgtgacttccccttaccgctgcgcgtcagctccggattcacaccggattcccttttcactcgctgcttgaggccggacggcaatgctacgatcaatgcaaatagatgtctagactgctactaatgttacaaataataaacgcgacaaaactggacttcacgggctgattccctacaatccccgctgatcaaatttgcctgacgagaagaaacacatgacgcccgagaatttgcctattgaacgttacgatgaccaactggcggagaaagtcgcccgcctgaagacgttgatgtcaccgttcgcggcgcccgagccggaagtgttccgctcgccagtcgaccactaccgcatgcgcgccgaattccgcatctggcacgacgcggaagacatgtatcacatcatgttcgatcagcagaccaagcagcgtattcgcgtcgatcaattcccggccgccagcgaactgatcaaccgcctgatgagcgccctgatcgccgcgctgaaaccggagccgatcctgcgccacaagctgttccagatcgattatctgtcgacgcaaagcggtaaaatcatcgcctcgctgctgtaccaccgcaagctggatgacgcttggcagcagcgcgccgagcaactgcgcgacgagctgcgggcgcagggttttgacctgcagctgatcggccgagcgtcgaagaccaagatcatgctcgaccaggattatgttgacgaagtgctgccggtcgccggccgcgatatgatctaccgccaggtggaaaacagctttactcaacccaacgcggccatgaacgtgcagatgctggaatgggcgctggcggtcaccgccggttccaaaggcgatttactggagctgtactgcggcaacggcaacttctcgctggcgttggcgcgcaatttcgagcgcgtgctggcgaccgagatcgccaagccgtcggtggcggcggcgcagtacaacatcgccgccaaccatatcgacaacgtgcagatcatccgcatggcggcggaagacttcacccaggcgatgaacggagtacgcgaattcaaccggttgaaaggcatcgatctgagcggctacaactgcgagacgattttcgtcgatccgccgcgcagcgggctggacgcggaaacggtgaagatggtgcaggcttacccgcgcattctgtatatttcatgcaatccggaaacgctgtgcgccaacctggaaacgctgcaggccacgcaccgggtcagccgcctggcgctgttcgaccagttcccgtatacccatcacatggaatgcggcgtgttgctggaaaaacaccgctgatacgacaggggcgccatgatggcgccccgtttcattacggctcttgagtcggcgcatccagcgccttgcgcgcctttagcttgaccccgatccacagcaccagcgccacacagatcaccgacggcaggaagttggagccgatctgcgggtattcggcgcgcacgatggcgctgtacatcaacagccccagcaggaagcaggccgccgccagcttcggcatgccgtccggcatggcgcggttcaggtaacgctgatgcagacagtacaccgccagcaccaacgcaatcagcgggaagatcgaaaacggcaccaccgagctgaacagcgcggcaaaggaaccgttgatcgaaaggccggcaatcaacgccagcagtaaggtgccattttcacggcctggtttttccatcattttttaccttttttatacgtgggacacagaagctttttcttgttcgcgacgataccagtaatacgcccctttggagatcatccgcagctgcagcaccagccgttcttccagctgctgccgctgctcgacgtcgatatccagcgcttccgcgccggcgctgaacacgatggtgaccatcgcttccgcctgcgcttcggtaaagctgcgcggcatgtggttttccaactcgaggtagtccgccagttcggcgatgaaatgctggatctcgcgcgccaccgccgcacgaaatgccgccgacgtgccggagcgctcgcgcagcagcaggcggaaggcgttcgggttgttgccgataaattccataaaggtggacaccgaggtgcggatcacgctgccgcccttggcgatgcgttggcgcgcctggcgcatcaactgacgcagcatcaggccgctttcgtccaccatggtcagccccagctcgtccacatcgcggaaatggcgataaaacgacgtgggcgcgatgcccgcctcgcgtgaaacttcccgcaggctcaggctggcgaagctgcgttcggcgctcagctggctgaatgcggcttcgatcagggaacgacgagtccgttctttttgttgtgctctgacgcccatatgcatatccggataggttccattctctcagtctaacgccctagactcggcaatatagcaaattttattgcaacagcatttatactaacgcgctctatcacacttccgccctgagccgattgtgctttgactcaaaaagcctaatggtgattgggtgagcagcgctatgatgttaagataccgttgtaatcttgtataaaaaaacaggtctctcctacatgcaacagcactatcaatttgatgccatagtgattggctcgggccctggtggtgaaggtgccgccatggggctggtgaaacagggcgcccgtgtggccgttatcgaacggtacaacaacgtaggcggcggatgtacccattggggcaccattccttccaaagccctccgccacgccgtcagccgcattatcgaattcaaccagaacccgctttacaacaattcgcgcacgcttagcgcgaccttccctgacattttacgccacgccgataacgtcatcagccagcagacccgcatgcgccaagggttctatgagcggaaccagtgcaagctgttcgccggcgacgcgcgcttcatcgacgccaacaccgtcagcgtcagctacatggacggcacccaggacaccatccgcgccgaccacatcgtgatcgcctgcggctcgcgcccttaccatccggccagcgtcgatttcaatcacccgcgcatctacgacagcgactccattctcgagctgagccatgaaccgcgccacgtgatcatttacggcgccggggtgatcggctgcgaatatgcgtccatcttccgcggcctgaacgtcaaggtggatctgatcaacacccgcgatcggctgctggcgttcctcgatcaggagatgtcggattcgctctcttaccacttctggaacaacggcgtggtgatccgccacaacgaagaattcgagaagatcgaaggcaccgaagacggcgtgatcgtgcacctgaagtccggcaagaaggtgaaagcggactgcctgctgtacgccaacggccgtaccggcaacaccgattcgttggggttggagaacgttggtctggagtcggacagccgcgggctgctgaaagtgaacagcatgtatcaaaccgcgctgtcgcacatttatgcggtcggtgacgtgatcggctatccgagcctggcttccgccgcctacgatcagggccgcatcgccgcgcaagcgatcgcctccggcgaagccagcggtcacttaatcgaagatatcccgaccggcatctacaccattccggaaatcagctccgtcggcaaaaccgagcaggaactgaccgcgatgaaggtgccgtatgaagtgggccgcgcccagttcaagcatctggcgcgcgcgcagatagccgggatgaacgtcggcagcctgaaaatcctgttccatcgcgacaccctgcagatccttgggatccactgcttcggcgagcgtgcggcggagatcatccacatcggccaggcgatcatggaacagaaaggtgaaggcaatactatcgagtatttcgttaatacgaccttcaactatccgaccatggccgaagcctaccgggtggcggcgcttaacggcttaaaccgcctgttttaacgcgctgtcgatgtagccctgcatgtgctcgcggatcgcttcggccaactgctcataacggctgcgcagtggggaaccggggcgatacaccaacgcgatggtgcgcttcggttccggcttgtagcaatccagatagcacacgccgtcgcgttcgcgctgcggcggcaccgccagtgacggcagcagggtaatgccgctgccggcagcgaccatattgcgcaacgtttccagactggtggcgcggaagtgagtatcttcgtccgcgcccgcctggaagcagaagcccatcgcctgatcgcgcaggcagtggccatcttccagcatcagcagcttctctcccgctaaatccggcatcgccacgcgctcacgctgcgcccacgggtgatcggaatacaccgccagcttcatcggttcatcgaacagaggcacttcgataaacgcctcggtttccttcaccaacgccagaatggcgcagtccagtttgccgctgtcgagttgcgccagcagttggtgggtttgcgcttcatgcaggtacatttccagtttcgggaaggttttgtgcagcgtcgggatgatctgcggcagcagataaggccccacggtcgggatcaggccgatgtgcagcggcccggacatggcttcgccctgctggctggccatctccttcaacactttcacttcgcgcagcacggtacgcgcctgctccaccagcaacagacccgcctgggtgaacagcaccttgcggctggtgcgctcgagcagcatgacgcccaactcgtcttccagcttgcggatctgcccgctcagcgtgggttggcttacatggcatgaatcggccgcgcggcggaagtgccggtgctcggccaaggcgaccagatactctaaatcacgaatattcattgtttccctccattccatgatagctcatggcgatagataagatagcaatgagcgattagatctatcaagccccagcgacaataatgtgtcccaacgaagcgatatcgcgctaaatgctaaaaattacttttcctaattaaggggttaatcaatgtttaccagtcaagaaggcaagaaagttcctcaggttactttccacacccgtcagggcgaccaatggattgatgtgaccactgatgacctgttcaaaaacaaaaccgtcattgttttctcgctgccgggcgcgttcacgccgacctgttcttcgagccacctgccgcgctacaacgaactgtccagcgtattcaagcagcacggcgtcgacagcattctgtgcgtctcggtgaacgacaccttcgtcatgaacgcctggaaagccgatcagcatgcggaaaacatcaccttcgtgccggacggcaacggtgaattcaccaaaggcatgaacatgctggtcgagaaagcggatctgggctttggccctcgctcttggcgctactcgatgctggtacgcaacggcgtggtcgagaaaatgtttgtcgagccgaacaagccgggcgacccgtttgaagtgtccgacgccgatactatgctgaaatacctggcgccggaattcaaagtgcaggaatcggtctccctgttcaccaaaccgggctgcccattctgcgccaaagccaagcagatgctgcaagagcgcggcattcagtatgaagagatcgtgctgggcaaagacgccaccaccgtcagcctgcgcgccgtcagcggccgcgctacggtgccgcaggtattcatcggcggccgtcacatcggcggcagcgacgatctggaaacattcctgtcagcttaataagtaataacaaagccaacgtgaactttggcgggctacggcccgccctttttttacctttcaggagcggatatgaaactgttgaacgttgatgtcgcggtcatcggcggcggcaccgcagggctcggcgcctaccgagcggccaaactgtctacccccagcgtggtgatgatcgaaggtgggccttatggcaccacctgtgcgcgcgttggctgcatgccatccaaattattgatcgccgccgccgaagcggtgcatcaaatcgaacgtgcgccgggctttggcgtgcacccaaccggcaaaacgcgtatcgacggacgcgaggtgatggcgcgcgtcaaacgcgaacgcgatcgtttcgtcggcttcgtgctggaaggcgtggacgagatcccggccgccgacaaaattcagggctatgcccgctttatcgacgacaacacgctgcaggtcgatgagcatacgcgcattgtggcgcagcgcatcgtgatcgccaccggctctcgccccagctggccggcgccgtggaatgaactgggcgatcgcctgatcgtcaacgacgatctgttcaactgggatgacttgccgcagtccgtggcggtattcggccccggcgtgatcgggctggagctggggcaagcgctgcaccgcctcggcgtcgacaccaaagtcttcggcatcggcggcgccgtcgggccgctcaccgacagcgccgtgcgcgattacgctgcgaaggcgctgggggaagagttctacctcgacgccgacgtgaaagtggagatgatgcagcgcgaaggcgaccgcgtatttatccgctatcaggatctgcagggccagtcgcaggagatcctggtggactacgtgctggccgccaccggccgccgccccaacgtcgatcggcttggcctcgagaacaccggcctgcagctcgacgctcgaggcgtgccgctggccgaccgcctgacgatgcaaaccagcgtgccgcatatctttatcgccggcgacgccagcaaccagctgccgctgttgcatgaggccagcgatcaggcgcgcatcgccggcgccaacgccggcagcttcccggagatcaatccgggtctgcgccgcagcgcgatttcggtggtgttctccgatccgcagatcgccatggtcggctcgaccttccgcgagctgagcgagaagttcagcgcctgcggctgttttgaagtgggcaaggtctcgtttgagaatcagggccgctctcgggtgatgctgcgcaacaagggcgttctgcacgtttacggcgaacagggcaccggccgtttcctcggtgcggaaatgatcggcccggacgccgaacacattgcgcacctgttggcctgggcgcaccagcagcagatgaccgtcgatcagatgctggacatgccgttctatcatccagtgatcgaagaaggcttgcgcaccgcgctgcgcgacctgcaggcgaagctcaaactcggcgcggccgaaatcgagcgctgccagcgctgcccgggcgaataacctcccattctccgttcatacccaccgggccttcaggcccggtttttttgcgcagcactttcacatttgcctccctcctcttgcctcacggccctcctgcgctcattttttatgctccgacattgaattgatatcaatatagatactaaaatgaaggaaggagccagaatggaagaagaacatggaaaagcatgaacactatacctatcgcatcacctggtcagcggaagatcgtgaatatgtcgggctgtgtgccgaattcccctctctgtcctggctggccgccacgcgtactggcgcactggagggcatcgaaagagtggtgagcgaaacgatcgccgatatgctggcgcaaggcgaaacgccgccgcaggcgctggcggaaaagaacttcagcggcaaactggtactgcgcatgacgccggaacagcatcgccggctggcgattggcgcgatggaggaaggcgtgagcctgaaccgttatctgtgcgcccgcctggcggggtagaggttcaagggcggcgccaggccgcccttgtcgtcgtcaagccaaacgctgtttcgctgcggcgattgccgcggcgacctgctgcggcgcaacgccgcctttggccgcacgtttgtccaggcaggattgcaacgccaggatcgggtagacatcgtcagcgatcgtcgcgctgaactgctgcaaatccgccagcggcagcgcttccagcggtttgccctggcgaatcgcttctaccactgcctcaccgacgatatggtgcgcttcgcggaacggcacgcccttggcgaccaggtagtccgccagctcggtggcgttggcatagccctgctccgccgcttcctggcagcgcgggcgcttcacctgaatgccgtccagcaccagcgccgccatctgcaggcagtccatccaggtgtcgagcgcgtcgaacaacccttctttgtcttcctgcatgtctttgttgtacgccagcggcaggcctttcagcgtcatcatcatgccggtcagcgcgccctgtacgcgaccgcacttaccgcggatcagctccagcgcgtccgggtttttcttctgcggcatcaacgaagagccggaggtcacgcggtcggacagctcgacaaacgccgcctcgccgctgttgaaaaagatcagatcttcggcgaagcgcgacaggtgcaccatgctgatggcggcgttggacagcagttccaacacgtgatcgcgatcggatacgctgtccaggctgttgcgggtcgccgaggcgaagcccagccagccggccagttgctcgcgatcgataggataagcagtgccggccagcgcgccgctgcccagcgggctgacgtccagccgtttcagggtgtcctgcagacggctttcatcgcgcgccagcatctcgacataggccaggcaccagtgcgcgaaagtcaccggctgcgcgcgttgcaggtgggtataccccggcatcaccgcatcctggttggcttcggcggtctccaccagcgcctgctgcagctggacgatcgcttgatgcagatcgccgatctgctgtttgcaccacagcttcagatcggtcgcgacctgatcgttgcggctgcggccggtgtgcagcttcttgcccaaatcgccgaccttctcgatcagcttctgctccacccagctgtggatgtcttcggcatcgctttgcacgatcgccaaaggatcggcctggacttccgtcagcaaggcattcagcgcctgctccagctgctgttgctccgttgccgtcaacacgttaacggtcaccagcgccttcgaccaggccaccgagcccacgatatcttgctccgccaggcgataatcgaaccgcagcgaatcgttgagttgcttgaaccgctgatccgccgcctgagtgaaccgtccgccccaaagtgccatacctttactcctgaatttttatgcgaaagggcgcagcatgctgcgcccttgcagagtcacgccaatcggttatttattctttttctcgttcaacgcgcggatgcgtgaagacagagagaacaggcggataaagccgcccgcgtggctgtgatcgtaaacttcgtcttcaccgaaggtggcgaactcttcggagtacaggctgttggcggattttttctggatcgccgtcacctggcctttgtacagctgcagcaccacttcgccgttcacctcttcagccaatgcttcggcagaggcctgcagcgagcggcgcagcggcgcgaaccaacggccgtcgtacaccacataggacatctccaggcccagctgctcgcgccatttgaagctgtcgcggtccagcaccagctgctcgacggcgcgcagcgccgccaccaggatggtgccccccggggtctcatagcagccgcgggatttgatgcccaccagacggttttccacgatgtcgatacggccgacgccgtgcttggcgcccagcgcgttcagggtttccaggcactggtacggcgacagcgctttaccgttaaccgccacaacgcggcctttctcaacggtgacggtcacctgctcaggctgatccggcgcttcctgcggatcgacggtccatacccagcaatccttgttcggcgcattccacgggctttccagcacgccgccttcggtggagatgtgccaggcgttctcatcgcggctgtagatcttctccagcgacgcggtagtcgggatgttgcgctctttcaggtaatccagcagcgcttcacgggaacgcaggttccactcacgccacggcgccaccactttcagctgcggcgccagcgcggtgtaggtggtttcgaaacgcacctgatcgttgcctttgccggttgcgccgtggcacagcgcgtccgcgcccactttcaacgccaactcgacctgcgccttggcaatgatcggccgcgccattgaggtgcccagcaggtagctgccttcgtacagggcgccggtctgcagcaccggataaacgtaatcgcggataaattcttcacgcagatcgaccacgtgacattcagaggcaccggactgcagggctttttgctccacgccttccagatcgctgcgctcctggccgatgtccgccacgaacgccaccacttcacagccgccgtagttctctttcagccatggaatgatggccgaggtatccaggccgccggagtacgccagaacgatttttttgatgccttggttttgcatgatctattcctttctaattctaaaattaagcgaggatccgggtgccaatcgacacgccgttaaacaaagcaggaagctgatcggcatggcgccagctggcgatatccaccgggcggccgagggtgcgggcggcgtcgagtgccgcattcaccttcaccaccataccatcggtgatgatgccttgcgcgatcagttgttccgctttttgcgccgtcatttccgcaatgcgttggcccttgccgtcgaggatgccgctgacgtccgacagcaggatcagatccgcccccagcgtcgccgccagcgccgtcgccgcctgatcggcgttcacgttcattaactgcccttcggcggtgatgccgatggagctgataaccggcaggtagccggcgcccagcagggtattaagcagcgcgggcgaaccgggctgcgcgttgccgacgtggcccaatgccggatcgagctgggtcacgactgcgctgccgccgtccgccaggctcaggccaacggcgttgatttggtgtttaatcgcccacgccagcagcgttttgttggcggtgccggccagcgcgccggtgatgatgtcgatctgatcggccggcgtgacgcgcaggccgttctttttcaccaccggtaaagcgagctgcttcatcagctcgtccaccacgcagccgccgccgtgcacgatcaccagcggacgctgatgctgctgccggtagctgtccaacgcggtaaacagacgctccagcgcttcttcactgtctaataacacgccacctaacttgataattaacgggttcattgctgtttactcacgctggtttaaaggagtgattgggtttccgggaagccgaaacggatattcaggcattgcaccgcctgcgccgccgcgcctttcagcaggttatcttccgccgccacggcgatcagatgctcgccctgcaccgcaaaaccgatgtcgcagaacggcagccccaccaccgctttcagcgccggcacgccctggtcgtacagccgcaccagcggcttgtcgtcataggcggcatgataggcggcggccacgtcctgcgcggtcaccccggctttcagacggcaggtgatggtttcaaggatgccgcgcgggaaattgcccaggtgcggcgtaaagatgaccggcacgccaaggtgcgcggcgatctccggctggtgccggtgagtgaaaataccgtacggctgcaggctcacttcgcagaaactggtggtcatgctggccttgcgcccggcgccgctgacgccgctggtggcgttgatcaccggccactggtcgaggttcagcagttgcttttcgatcaacggtttcagcgccagctgcgccgccgtcgggtagcagcccggcaccgcgatcagctgcgcctgtttgatcttgtcgctctgccactccgccaggccgtacaccgcctgctccagcagggcgccatgctgatgctcgaaaccgtagtactggctataaaaaccggcgtcctgcacgcgaaaggcgccggacagatcgaacaccacgcagcccgccgccaggaaagccggtgcgatatcgtggctgacttcatgggcggtggcgaggaacactacatcgatgccctgcgccgccttggcgacgtcggtcaacggctgcagcggcagatcgacgatgcctttcaactggggatggagatcggaaagcaactttcctgcatctgcactttgcgctgaaaccgctaaagcggttatgttcatgtgtgggtggcgattcaggtaagccgtgagctccgctccggcgtaaccgctggcaccaacgatcagcgtattcaacatgtggcctttcaccttctaaactgacgtgcggtcgcttgcgacccaggtaacagggctagccagcgttgttgcgccgttcacccacggagccaggcgttgatgcttttataaacatccgggcatcgggttcccttacgcttcggcttactgtatttttattcaaaataaatgcatgaatattgatactatcctaacctaaggctgtcaacagtgaagatgaaattacctccatttattgagctgtaccgggcgttgatcgccactccgtcaatcagcgccaccgatgccggcctcgatcagagcaatgaggcgttaatcaacttgctggccggatggtttgccgacctgggcttccgcgtcgacgtgcagccggtgccggagtcgcgccacaaattcaacctgctggccagcatcggcgaaggcagcggcggcctgctgctggccggccacaccgatacggtgccttacgacgaaggccgctggacgcgcgatcccttcaccctgaccgagcacgacaacaagctctacgggctgggcaccgccgacatgaaaggcttcttcgcctttattctggatgcggtgcgcgatatcgacgctagcaagctgaccaagccgctgtacattttagccaccgcagatgaagaaacgacgatggccggcgcgcgttatttcgccgcctccaccgccattcggccggatttcgccatcatcggcgagccgacctcgctgcagccggtgcgcgcgcacaagggccacatggccaatgccattcgcatcgtcggccagtccggccactccagcgatccggcgcgcggcgtcaacgccatcgatctgatgcacgagtccatcggccgcctgatggagctgcgcaagaccctgcaggagcgctacaacaacccggcgttcgccgtgccttatcccaccatgaacttcggccatatcagcggcggtgacgcggccaaccgcatctgcgcctgctgcgaactgcacctggatatccgcccgctgcccggcatgacgctcgacaacatcaacgaactgatgcatcaggcgctggagccggtaagccaacgctggccgggccgcctgaccatcgaagagctgcacgcgtcggtgccgggctacgagtgcccgaccgaccaccgcatggtggcggtgatcgaggagctgctgggcacccgcacgcaggtggtcaactactgcaccgaagcgccgttcgtgcaacaggtatgcccgaccctggtgctcggccccggctccatcgatcaggcccaccagccggacgagtacatcgacaccgcgtttatcgaaccgacgcgcaaactgttgggtcagctggtcaatcacttttgccggcaataaacccgacatttaacaggggaaatgctttatgcttcccctaactcaaaataagtagaaaacggcgaaataagccgtgctgataaccgacgcgccgtaattaaatttcagaaaatgcgccgattttgatgtttttttgctaaaaatagtgtcaattgacgattggacaggaacgcgatgtgatcaggcaggcggtctgcgcctgacgcgtgaaatttatttacaagataaaaatcatacagaactgggtcaggggttatatgaacgaacaatattcggcaatgcgcagtaatgtcagtatgctcggcaaattgctcggcgataccatcaaagaagcgctgggtgagcatattctcgatcgcgttgagaccatccgtaagctttccaaatcctcacgcgccggcaacgaagcgcatcgccaggagctgctctccaccctgcagaacctgtccaacgacgagctgctgccggtggcgcgcgccttcagccagttcctcaacctgaccaacgtcgccgagcagtaccacagcatttcgcccaacggcgaggccgccagcaacccggaagcgctggctcaactgttcagccgtctcaaagacaaaaagctcagcgacaaagagctgcagcacgcggtatcgcaactctccatcgagctggtgctgacggcgcacccgacggagatcacccgtcgcaccctgatccacaagctggtggaggtcaacacctgcctcagccagctcgatcacaacgatctggccgactacgagcgcaacaagatcatgcgccgcctgcgccagctggtggcccagtcgtggcacaccgatgaaattcgcaaacaccgcccttccccgatcgacgaagccaaatggggctttgcggtggtggaaaacagcctgtgggaaggcgtgccggcgttcctgcgcgaattcaacgaacagttggaaaactccatcgattacagcctgccggtggaagcggtgccggtgcgcttcacctcctggatgggcggcgaccgcgacggcaacccgaacgtgaccgccgaaattacccgccatgtgctgctgctcagccgctggaaagcctgcgacctgttcacccgcgacatccaggtgctggtctctgagctgtcgatgaccgaatgtaccccggagctgcgcgcccgcgccggcggcgatgaggtgcaggaaccgtaccgcgaaatcatgaagcagctgcgcagccagctgatgagttcccaggcttatctggaaggccgcctgaagggcgagcgcgtgctgaaaccgcacgacctgctggtgaacaacgagcagctgtgggagccgctgtatgcctgctaccagtcgctgcaggcctgcggcatgggcatcatcgccaatggtcaactgctggataccctgcgccgcgtgcgctgcttcggcgtgccgttggtgcgcatcgacgtgcgccaggaaagcacccgccataccgaagccatcgccgagctgacccgctatctggggctgggcgactatgaaagctggtcggaagccgataaacaggcgttcctgatccgcgaactgaactccaaacgcccgctggtgccgctgaagtggcaaccgagcgccgacacgcaggaagtgctggaaacctgccgggtgatcgccgaagcgccgcagggctcgatcgccgcctacgtgatttcgatggcgcgcacgccttccgacgtgctggcggtgcacctgctgctgaaagaggccggctgcccgttcgcgctgccggtcgccccgctgttcgaaaccctcgacgacctgaacaacgccgacgacgtaatgacccagttgctgaatatcgattggtatcgcggcttcatccagggcaaacagatggtgatgatcggctattccgactcggcgaaagacgccggcgtgatggccgcttcctgggcgcagtaccgcgcgcaggacgcgctgatcaaaacctgtgaaaaggccggcgtggcgctgacgctgttccacggccgcggcggctccatcggccgcggcggcgcaccggcgcatgcggcgctgctgtcgcagccgccgggcagcctgaagggcggcctgcgcgtcaccgaacagggtgagatgatccgcttcaagttcggcctgccggaagtcaccataagcagcctggcgctgtatgccggcgcgatcctcgaggccaacctgctgccgccgccggaaccgaagaaagaatggcgggcgttgatggacgacctgtccgacacctcctgccggatgtaccgcggctacgtgcgtgaaaacccggacttcgtgccttacttccgcgcggccacgccggagctggagctgggcaaactgccgctgggctcgcgcccggccaagcgcaagccgaacggcggcgtagagagcctgcgcgccattccgtggatcttcgcctggacgcagaaccgcctgatgctgccggcctggctcggcgccggcgccggattgcaggaagcggtgaaggccggcaaacaggcggagctggaggcgatgtgtcgcgattggccgttcttctccacccgcatcgccatgctggaaatggtgttcgccaaagccgacctgtggctggcggaatactacgatcagcgcctggtggataaatcgctgtggccgctgggccaacagctgcgcgatcagctggaaagcgacatcaaggtagtgctgaccatcgccaacgatgcgcacctgatggaagacctgccgtggatcgccgaatccatcgcgctgcgcaacgtctataccgacccgctgaacgtcttgcaggccgagctgctgcaccgttcgcgtcagcaggagcagccggacgcccgcgtggagcaggcgctgatggtcaccatcgccggcgtcgccgccgggatgcgcaacaccggctagtgagcctcatcgcggccccgtttatcggggccgttttttatgccttcccccacaaaaaaagggcgccgcggtaaagcgacgcccttttcaatggagcaagcccgtcaggcggcggccaccgggcgcacgcccagcgtgtggcagatggcgtagctcatctcggcgcggttcagggtatagaagtggaaatctttcaccccttcgcggctgaggatcttcaccatgtccatggcgatgttggcgccgaccattttgcgggtctccgcatcgtcgtccagcccttcgaacatgctggtcatccagctcggcacccgcacgttggtcatggtggcgaagcgctgcagctgcttgaagttggacaccggcaaaatgcccggcacgatttccacgtcgataccggcggcgacgcagcggtcgcgaaagcgcaggtagctctcaacgtcgaagaagaactgggtaatcgcgcgactggcgccggcatcgatcttgcgtttcaggttaatcaaatcggcctgggcgctcttcgcctccgggtgcacttccgggtaggcggcgacggaaatgtcgaagtcgcccacgtctttcagcagcgccaccagatcggtcgcgtacatgtccggcttgccgccgcccggcggcagatcgccgcgcagcgccacgatatggcggatgccgctgttccagtaatcggtcgcgatgtcgcgcagctgcgccgggctggcatcgatgcaggtcaggtgcggcgccgcctccaggccggtgcgttccttgatccctttgatgatgctgtgggtgcgatcgcgctcgccggagttggcgccgtaggtgacggaaacgaatttaggcttgaggatgctcagacgatcgatcgactgccacagggtctcttccatctcgctggtgcgtggcgggaagaactcgaatgatacgttaatctggccgttcaactccgccagactctgattcagcgcttcccgctggtttgcgtggaaaaaactcataccctgctcacctcttatcgatcactgtttttatttcatcttgatgagcgtctatacgtttagacgtctagatagaaaatgccgcatgttggctaaagagtcaacaggaaaatgaggggaataagatgattaatcctcacccgctcaacgagggaatttcatgatcgcgacaaagataagtatggcaggaaaagcaaaagggcgcggtgaacccgcgcccgcagaggattaaagcagctgcgccaatcggttaaggtctgactggatcgcgccggcggtgacgtcgcggccggcgcccggcccgcggatcaccagcggattatcgcgataccagcggctttcgatggcgaacacgttgtcgcacggcagcagcgaggccagaggatgctcagggcgcaccgcctccacgccgacccgcgccttgccgttggcgtcgaaacgcgccacgtggcgcagcaccaggcccatttcgctggcggcctcaaagcgctgctgcatctgctggttcagcgcctcaccgttctcgaagaactgatcgacagagcccagctcgcagcccgccggcaccagcgactcgacccgcacctggttcggttcgatgtcgtagcccgcttcgcgcgccaggatcaccagcttgcgcatcacgtcctggccggagagatcgacccgcggatccggttcggtcagcccctgctgccaggcctgatccaccagctcggtgaacggcaccgtgccgtcatactgcaggaacagccaggagagcgtgccggagaagatgccgctgatcgccagaatgctgtcgccgctgtcgcgcagatcgcgcaccgtgtggttgaccggcaggccggcgccgacggtggcgttatacagccagtggcggccggttttggcgaaggcgtcgcgaatttggcgatagctgtcgctgcacgaggcccccgccaacttgttggcgctgatcacgtggaaaccgtagctggcgaaatccagatactgcccggccagctcttcgctggcggtcacgtcaagcaccaccagatcgtcgaacgggtgcgcgcgcatccacaggaacagcgattcttcatccagctcctgcgcttcgtcctcaaagaatgccagcgcgcggctggcgtccagcccgtcatagttcagcaggctgcggcggctgtccaccacccccgccaggataaattcgaagccgctgcgcgcggagatattggtctgctcacgggcgaacagctccagccagcgcgagccgatattgcccttgccgaacagcaccagaccgatgcgcttctcggcgcggaacaggctttggtgcagcccctggatcagcagcgcggtcggcccctggcgcaataccgccaccaggctgatgccatcttccgcctgccagatgaactcgaccggctgatctttcaactgctgatagaaacggtggctgtgcagcgggttcttgcacaccccggcgccgaccatcgccaccagcgccaacccttcacgcaggcgcagctcgcctggcagcgccgcggcctgcagcgtcgccagcgcgctgttgaccacctcggaggtgtaacacagctgcaccaggttgcggtcagggtggatgcccaccgccagcggttttatctgcgcgcgcttgagcaccagatccaactctttctgcgccagtttgaagtcatgttgagcggcgacgtgcagttcaatcaggcacacatcgtcgtggctggtgacaatcttggcgccggtgccggaagccaatacgcgctcgatgcgcgtcgagccctgctccggctgatagctgcagcgcagctgaagatcgatatcgctgccggagaccggctgcagggtacgggtgtgcaataccggcgccgccaggcgcgccagctcgctggcttcgtccagacgcagcagcggcagcaagcaggcgtctttcaccttgcgcggatcggcgctgtataccccggccacgtcgctccagatggtgacgcgcgcagcgccggccaacgcgccgacctgagtggcggagtagtcgctgccgttacgccccaacaacacggtttccccagcgtcgttgcgcgaaatgaagccggtcaccaccaggcgtttgcccggatgttgagccatcaattgctgcagcagcgggtaagaacggccttcatccacctgcggctgcgcggcgcgctcggcgcgcaggaaatcacgcgcgtccagccaggccgcctgcatatccagctgattaagcaccgccgccatcaggcgcgccgaccagatctcgccgtgcccgaccacttcggcatagcatacctcgtcgacgttgccgtccagcagccccgccagacgttccagatcctgaatgaactcggcgatcagcggctcggcgctttccggcggcaacaggccgctgataagatcgctgtgatagcgacgcaacgtctgctgcacctgatgcgcagacaggcgatcgctctggctgagcttcagccagttgatcaactggttggtggtactgccggcggccgataccaccatcatgtcgcccggctggctgtattccgccataatcccggccacacgcagataacacttcacatccgccagactgctgccgccaaacttgtgcagttgacgcccgctcaccggccctgctacagcaattgcattcatgcttacctcgttgccgccgcctggaaagcgcgttccagatcggcaatcaaatcttcactgtcttcaatacccacggaaatgcgcagcaggctctcggagatgccggccgctgcccgcgcctccgccgccatgccggcgtgagtcatggtcgctgcatgcgagatcaggctttctacgccgcccaacgattctgccagagtaaacagctcaagggcagagagaaaacggcgcagcaccgcttcatcgccgtccagttcaaaactcagcatcgcgccgaaaccgcgctgctgacgacgggcgatctcatgccccggattctccggcagggagggatgatacagctttttcaccagcggttgctgctgtaaatagtcaacaatcgcttcagcgttttgttgcgccgccttgatgcgcggcgacagcgtgcgcatgccgcgcagcaacagataactgtcgaacgcgccgccggtcacgccaatgttgttcgcccaccaggccagctcgaccgccagctcgggatctttggcaatcaccgccccggccaccacgtccgaatgcccgttcaggtatttggtgcaagaatggaccaccagatcggcaccgagttcgatcggctgttgcagggccgggctgaggaaggtgttgtccaccaccgtcaacgcgcccgccgcatgcgcggcagcgcagatcgccgcgatgtccaccacccgcagcagcggattgctggggctttctatcagcaccagcttcggcttttgcgccagcgcctgctgcagggcttcttcattaccctgatcgacgaacagcacgcgataggcgccgcgcttgctcaggctgtcgaacagccgatagctgccgccgtagcagtcgtgcggcgccaccagcagatcgccgggcttcaacaacacggtggtcaccagatggatcgccgacatcccgctgccggtcatcaccgcgccggcgccgccttccagctccgccaacgcgcgctgcactacgtcgcgcgtcgggttgccgcgtcgcgagtagtcatgggctcggggttggttgaagtcggtaaagttataggtgctggacaaatgaatcggcgggacaacgcagccgtactgttcgtcgtcgttcaggccgctgcgtacggcaatcgtggctggtttacgcgtcatgggctcgctcggctctcggttcggtggatgaggcctaaagagtaatcgcaggattgatagacgtcaatacatctggacatctaaacttctttgcgtatagattgagcaatgacacaatacccgctaaaattatgccgatatgacatgacgataagatgttaagcggcaatgcctggccgaagcggggcattcagtgaccctggtcgcgtaaaattgacatttatttagtgagaacagtgaagatcgggcataattggccggtttttagaattttgtaatttttctgacaaagttaaggtgtcccatggctgagtggaacggcgagtatgtcagcccttacgctgaacacggtaaaaaaagcgagcaagtcaaaaagatcacggtatccattccgctgaaggtcctgaaaatccttaccgacgaacggacccgtcgccaggtgaacaacctgcgccacgccaccaacagcgaactgctgtgcgaagcgtttctgcatgcctttaccggccagccgctgccgaacgatgaagacctgcgcaaagagcgcagcgatgaaatcccggaagccgcaaaagcgttgatgcgcgaactgggtgtcgatcccgatacctgggaatattaagaacagcccggcgaacgccggcggcagaaaagaaaaaaggcgcccagggcgcctttttcatcggtcgataagaaatcttatttcttagcgcctggtacgctgaaacgcttgttgaagcggtcaacgcggccaccggtagcaacgtcacgctgcttgccagtgtagaacgggtggcatgcgccacaaacgtccaggttcagatcgtggcccacggtggagcggatcttcatcacgttaccgcaagagcagttagcagtaacttcttcgtattttgggtggataccttgtttcatgggaaacctcagttaaggccgtgtcgctatccagccctgtttcgccagacaccacacgtggttgataatagaattttggtatcgaattataccaaaggcggcaaattatacagcattagccggggcgcgcaatcggaaccgtacatttgccgatgcgccgtgtaaactgatgcccactttttttcaatttggatgagatcatgcccgtcgtacacgttgctttgccggtccccctcgcccgcaccttcgactatctgctgccgcccggcatgcagccggtggccggcgcgcgcgtgggcgtgccctggggcaggcagcatgcaatcggcatcgtcaccggctgcagcgacaccagcgaactgccgctggacaagctcaaaccgatcgacagcgtgatcgacaccgagtcgctgttctctcccagcctgtggcgcatcctgcgctgggccagcgattactatcactatcccatcggtgaagtgctgttccatgcgctgccgatcctgctgcgccaaggcaaaccggccgaggccgcgccgctgtggcagtggttcgccaccgaagaggggcgcgccacgccgcccgaaagcctgaaacgcgcgccgaaacagcagcaggcgctggcggcgctgttgcaacgcccggtctatcgccatcaagtcagccagcttgagctgacggaaagcgctctacaggcgctgcgcgccaaagggctgatcgacctgcgtgctcaggtcgcggccacgcaggactggcgccccaatttcgcggtgcttggcgagcggctgcggctgaataccgaacaggccaccgccgtcggggcgatcagaagcgaggatgagcagttcgccgcctggctgctggccggggtcaccggctccggcaagaccgaggtgtatctcagcgtgctggagaacgtgttggccaaaggccggcaggcgctggtgctggtgccggaaatcggcctgacgccacaaaccatcgcccgctttcgcgagcgcttcaacgcgccggtggacgtgctgcactccggactgaacgacagcgaacggctggcggtttggctgcgcgcgcgcagcggcgaagccgcgatcgtcatcggcacccgctcggcgctgttcacgccgttccggcaactgggcgtaatcatcatcgacgaagagcacgacagctcttataaacagcaggaaggctggcgctaccatgcccgcgatctggcggtgtttcgcgcccgggaagaggacatcccgatggtgatgggctccgccacgccggcactggaaacgctgcacaacgtgcagctgggcaaatatcgccagttgaagctcacccaacgcgcgggcaacgccaaaccggcggcgcagcacctgatcgatctgaaaggtttgccgctgaaggtcggcctgtcgcagccgctgttgaagagcatgcagcaccatttaaaagccggcaatcaggtgatgctgttccttaaccgccgcggctatgccccggcgctgttgtgccacgaatgcggctggatcgccgagtgccagcgctgcgatcactattacaccttccaccagcatcagcgccagctgcgctgccaccactgcgacagccagcggccggtgccgcaccaatgcccgcagtgcggctccacccacctggtatcggtcggcgtcggcaccgagcagctggagcaggagctggcgccgctgttccccgacacgccgatcacccgcatcgatcgcgacaccaccagccgtaaaggggcgctggagcagcacctggcggatattcatcgcggcgaagcgcgcattctgatcggcacgcagatgctggccaagggccaccattttcccgacgtcacgctggtggcgttgctggacgtggacggcgcgttgttctccgccgacttccgctccgccgagcgtttcgctcagctctatacccaggtctccgggcgcgcgggccgagcgggcaaacagggtgaagtgctgctgcaaacccaccacccggagcacccgttattgcaggtgctgctgcaacaaggttacgacgccttcgccaaacagacgctggcggagcgcaacagcgtgtttctgccgccctacaccagccacatcatcgtgcgcgccgaagatcacgataaccaacaggccccgctgttcctgcagcagctgcgcaacctgctggaagccagcccgctgaaggacgattcgctgtgggtgatgggcccggtgccggcgctgcaatccaaacgcggcggccgtttccgctggcagctgctgctgcagcacccgacgcggcgcgtcctgcaacagctgatgaaaagctcgctgccgctgatcggcaccctgccgcaaacgcgcaaggtgaaatggacgctggatgtcgatccgatcgacagctgatcccggaaaagtccgatttagctgccgcagtgcaaacgtttacccttgaaattgcgagcgaacgctaaaaaaccttctcaggtcacattttttatgcaaattaggtaacaaaggcggggcgtattctgtttagaatgtctgcgagggcaaattttgtcgccacatcgcagcgcgacggagtgcccgaacgcgagtggcgctcaatgacaacaatctcgccaccgcatgccggacattgtgagcaaacagcagtagtggcgtcggcatggggctgacgcaaggagaaaggcgttggaacacaagaaagagttatccatggcgaccatgaaagacgtcgccgaaatggcgggcgtttcaacggctaccgtatcgcgtgcgctgatgaacccggaaaaggtgtcaacgccaacgcgccagaaagtggaacaggccgtgctggccgtgggttattctcctcatgctctgtcacgcaatatcaaacgcaacgaatcccgcaccatcctggtgatcgtgcccgacatctgcgatccgtttttcgccgatgtgatccaggggatcgaacagaccgcggcccaacaaggttatctggtgctgatcggcgactgcgcgcagcagaaccagcaagagcgcaccttcgtcaatctgatcatcaccaaacagatcgacggtatgctgctgctgggctccaacctgccgtttgacgccagcaaggaagagcagcgcaacctgccgccgatggtgatggccaacgagtttgcccctgagctggaactgccgacggtgcacatcgataacctgaccgccgcctttgaagccgtgcattatttgcatcaattgggccaccggcagatcgcctgcgtcgccgggccggaacagatgccgctgagccattatcggctgcagggttacgttcaagcgctacgtcgtaatggcattaccgtcgaaagcagctatattacccggggtgattttacctacgaagccggcgcgcaagcgctgacggcgctgatggctcagccgaaaccgccgacggcggtgttctgccacagcgacgtcatggcgatcggcgtgctgtcccaggcgaagaaaatggggctgcgggttccgcaggatctgtcgatcgtcggctttgacgacctcaagctggcgcagtattgcgatccgccgctgaccacggtggcgcagccgcgcttccagatcggccagcaggcgatgttgctgctgctggagcagttgaacggccagacggtggccagcggctcccggctattggacagtgaattgattatcagaggcagcaccgctgccccgaaacgctagtcaaatattttagggttcagtaacatgacggacttatcctctcatcaggacacagcggaataatagtggcacaaaaagactatgtaagccgtgggcgcgcagcaggagctaagcgcaaaacccccagccgtaaaaaacgcagttctccgaaggtttccaaaaccgtgctggcgttagccgtcgcgttgctggttgtctttgtcggtggcctctatttcattacgcacaacaagccggaagacgcgccgttgttgcctgcgcacaccactcgcccgggcaacggcctgccgccgaagccggaagagcgctggcgctatatcaaagagctggaaaaccgccagatcggcgtgcaaactccgaccgaaccgacggccggcggcgagctcaattccaaaactcagctgaccgccgaacagcggcagttgctggaacaaatgcaggccgacatgcagcagcgcccgacgcagctgaacgaagtgccgtataacgatccgggccaggccaacgcgcgcagtaaccgccagcagcagcagatgcaacaacagcaaatgcagcagcagccggtacagcaacagcagcaggtcactcagccgccgcgcaacccgttcaacaacggggccaccaccgcgccggtgcagcagcaccagcagccgaagccggccacccagcaaccagtgcaggtgaaacagcctgagccgaagccgcaaccgaagccggagcccaaaccggaagtgaaacaggaaacggccaagcaggacaccaaaccggaatcgaaacagaagtggatggtgcaatgcggttcgttccgcgccaccgatcaggctgaatccgtgcgtgcgcgcctggcgttcgagggcatcgagagccgcatcaccgccggcggcggctggaatcgcgtagtgctcggcccctacagcagccgcgccgcagcggacaaaaccctttcgcgcctgaagggcgtcggcatgtcgagttgcattcccctctccgttgggggttgaaaagcgtcaatccccccccatctatactctcaatatgcctcgtagcgtctgcgaaagcaggcgctgcggggacttctttccgtctttaacgagggtctgctcgtgacaacaattgtaagcgtacgccgcaacggccaggtcgtcatcggtggtgatggccaggcaaccctgggtaatacggtgatgaagggtaacgtcaagaaagtgcgtcgcctgtataacgacaaagtgatcgccggtttcgccggtggcaccgctgacgccttcacgctgtttgaactgtttgaacgcaaactggaaatgcatcagggccacctggtgaaagccgccgtcgagctggcgaaagactggcgcaccgaccgcatgctgcgcaagctcgaagcgctgctggcggtcgccgatgaaaccgcctcgctgatcatcaccggcaacggcgatgtggtgcagccggaaaacgatctgatcgccatcggctccggcggcccgtacgcccaggccgccgcccgcgccatgttggaaaataccgaactgagcgcccgcgacatcgttgagaaatctctcaacatcgccggcgacatctgtatttacaccaaccatttccacaccattgaagaattgccttccaaagcgtaaggatcgaataccatgtctgaaatgaccccgcgcgagatcgtcagcgaactggacagctatatcattggccaaaacaaggccaaacgcgctgtcgccattgccctgcgcaaccgctggcgccggatgcagctcaacgagatgctgcgtcacgaagtgaccccgaaaaacattctgatgatcggcccgaccggcgtcggtaaaaccgaaatcgcccgccgtctggcgaagctggccaacgcgccgttcatcaaggttgaagccaccaagttcaccgaagtgggctatgtgggcaaagaagtggactccatcatccgcgatctgaccgatgccgccatcaaaatggtgcgcatgcagtcgatcgagaaaaaccgcacccgcgccgaagagttggccgaagagcgcattctcgacgtgctgatcccgccggccaaaaacaactggggccagccggaagaaaatcaggaaccgtccgccgcccgccaggcattccgcaagaaactgcgcgaaggccagctggatgacaaagagatcgaaatcgatctggccgccgcgccgatgggcgtggaaatcatggcgcctcctggcatggaagagatgaccaaccagctgcagtcgatgttccagaacctcggcggccagaagcaaaaaccgcgcaagctgaagatcaaagaagccttcaagctgctggtggaagaagaagccgccaagctggtgaatccggaagagctgaaagagcaggcgatcgaagcggttgagcagcacggcatcgtgtttatcgatgagatcgacaaaatctgtaagcgcggcggccaaagctccggcccggatgtctcgcgcgaaggggtgcagcgcgatctgctgccgctggtggaaggctgcaccgtgtccaccaagcacggcatggtgaagaccgaccacatcctgttcatcgcttccggcgcgttccagaccgccaatccgtcggatctgatcccggaactgcagggccgtctgccgatccgcgttgagctgcaggcgctgaccaccgaagacttcgagcgcatcctgaccgagccgagcgcgtcgctgaccgagcagtacaaagcgctgatgggcaccgaaggcgtcaacatcgagttcaccgccgacggcatccgccgcatcgccgaagccgcgtggcaggtcaacgaaagcaccgagaacatcggcgcgcgtcgtctgcacaccgtgctggagcgtctgatggaagatatttcctacgatgcgagtgaaattaatggccaatccattacaattgatgcggattacgtgcgcagtcatctggatgaactggtggcggatgaagatttgagtcgttttatcctataatcgctcaatcattgtcttgtcagtcatctgtgtgggaggcattgcctcccacaattatttctaacggacacagaagcgaaacatgagctcatcaacctccaccaccccgatttccgcctggctggaaagtctacgcccccgcaccctgccgctggcctttgcctccatcgtggtcggctcggcaatcgccgcctggcacggcagcctgaaaccggaagtagcgctcctggcgctgttgaccgccggcctgctgcagatcctctccaacctggcgaacgactacggcgatgcggtcaaaggcagcgacaaagaagatcgcatcgggccattgcgcggcatgcagaaaggcatgatcacccaggcgcagatgaaacgggcgctggtggtgacggtggtgctgatcgccctcgccggctgttcgctgatcgccgtcgcctgtgagcaacccagcgacgtggtgggtttcctggtgctgggcgggctgtccatcgtggcggccatcacctacaccgtcggcaacaagccctacggatatttggggctgggcgatatctcggtgctggtgttcttcggctggctgagcgtggccggcacctactatctgcagacgcacaccttcgacagcgtcgtgatgctgccggccaccgcctgcggcctgctggcgacggcggtgctcaacatcaacaatctgcgcgatatcgaaagcgatcgcgaaaacggcaagaatacgctggcagtgcgtctcggcccgcacaaggcgcgcatttaccacgccctgctgctcggcggcgcggtgctgtgtttcgcgctgttcacgctgttcaacctccacagcccgtggggttggctgttcgtgctggcgatcccgctgctggtgcgccacggcctgcgcgtgctgcgcgatccgacgccggtcggcatgcggccgatgctggagcatatggtcaaggcggcgttgctggccaacctgctgttcgccatcggcgtggcgctcagttaaaaactgatgattttgccaacagggcgaataaagggatatactgaacattcctgcggcaaacagacgtaaaatcctatgaaatacgatacttccgaactttgcgacatctatcatgaagaggtgaacgttgttgaacctctgttctccaattttggcgggcgtacttcatttggcgggcagatcaccacggtgaaatgctttgaggataacggcctgttattcgatctgcttgaagaaaacggccgcggccgcgtgctgttggtcgacggcggcggttcggtacgccgggcgctgatcaacgccgaactggcgcgcctggccgcccagaacgaatgggaaggcatcgtggtgtacggcgcggtgcgccaggtggacgatctggaagagctcgacatcggcattcaggcgatggcggcgatcccggcgggtgccgtaagcgaaggcgtgggcgaaagcgatatccgcgtcaacttcggtggcgtcaccttcttctcaggcgaccacctgtatgccgacaacaccggcatcatcctctccgaagacccgctcgacatcgagtgattttcggacatgaaaaagggcgcctcaggcgcccttttcgttgctgcatggcgtaaggaatcaaacctcttccattttgcccagcagcgcgcgcaggcgatcttgccatacgtgctgttcttctttcagctgttggttttcacgcaccagcgcttcgtggttgccggaggcagcctgaacttcctgcgacagagagttgtttttgtctttcagctcttcaatttccatctgcaacaaggtgatggtatcaatcgcctgctgtacttttgcttccagtttctcaaatacttcaaatgacatgcttcagtcccctcatgatagcaaggcgtacatctataagtagcggccgcaacgtcggctgcagctactgcgaatattgcatcgcgctcagtgacgcgcgccgttacgaaaggcgcgccggtctcgattcgttaaaaacgattgtaagtagccagtctccgcctgtctagcaacataccggatcatcgcgcagtctgttgcaattttcctgccctcgccatcagcaaaaactgaaaatccccatcgccgccgccgcgagttgttaacgcccctcgctaaaccactggtcagatcacacttttatggctcagaaagaacactaaacgacgcgaaatcgctcaattttatgacgcgccacacacattttgatttcgctatttctcgtttatgttcgttaacgataaatttacatcacgtcctcattcaataattggacgagatgaaaaaactgtgcccataggtcagatgtatacctggctgagcctataaaccaacaaccgccgttttgcaggacaccaacattatgagccaaaccaccagtccgacattaaaaggccagtgcatcgccgagttcctcggcacggcgctgctgatcttctttggcgtaggctgcgttgccgcgctgaaactggcgggcgccagcttcggccagtgggaaatcagcatcatttggggcctgggcgtcgccatggccatctatctgaccgccgcgatttccggtgcgcatctcaacccggcggtcaccctcgccctgtggctgttcgcctgcttcgacgggcgcaaagtggtgccttacatcattgcgcaggtcgccggcgccttctgcgccgcggccttggtctacgggctgtactacaatctgttcttcgacttcgaagcggcccaccacatggtgcgcggcagcaacgaaagcctcgaactggccggcatcttctcgacttaccctaacgcgcacatctccgtcggccaggccttcctggtagaaatggtgatcgctgcaatcctgatgtgcctgatcctggcgctgaccgacgacggcaacggcattccgcgcggcccgctggcgccgctgctgatcggtattctgattgccgtgatcggcgcctccatgggaccattgaccggctttgcgttgaacccggcgcgtgacttcgggccgaaactgttcgcctacctggccggctggggcaaagtcgccttcaccggcgcacgcgacatcccgtacttcctggtgccgatcttcgcccctatcgtcggctgtggcctgggcgctttcggttaccgcgcgctgattggccgccacctgccgtgcgacgtctgcgtgacggaagaagagcctgacgccaagacccagcagcgtaaagcgtgatgggtgcagttttacacggttaacaacagcaggataattaccatgactgtagaaaaaaaatacattgtcgcactcgaccaagggaccaccagctcacgtgccgtcgtgctcgatcacgacgccaacatcgttgcagtatcgcagcgcgaattcccgcagatctatccaaaggccggctgggttgagcacgacccaatggagatctgggcgtcgcaaagttcgacgctggtagaagtgctggcgaaagccgacatcaattccgatcagatcgccggcatcggcatcaccaaccagcgcgaaaccaccatcgtctgggaaaaagagaccggcaagccgatttacaacgccatcgtttggcagtgccgccgcaccgccgacatctgcgagaagctcaagcgcgacggcctggaagagtacatccgtcacaacaccggcctggtggttgacccgtacttctccggcaccaaggtgaagtggatcctggacaacgtcgaaggcgcccgcgagcgcgccaagcgcggcgaactgctgttcggcaccgtggatacctggctggtgtggaaaatgacccaggggcgcgtacacgtcaccgattacaccaacgcctcacgcaccatgatgttcaacatccacgaactggactgggacgagcgcatgctggaagtgctggatatcccgcgcgccatgctgccgaaagtccgcccgtcctccgaagtgtacggccagaccaacatcggcggtaagggcggcacgcgtattcctatcgccggtatcgccggtgaccagcaggcggcattgtacggccagctgtgcgttcaaccgggcatggcgaagaacacctacggcaccggctgcttcctgctgatgaacaccggcaaagaagcggtgcgttcgaaaaacggtctgctgaccaccatcgcctgcggcccacgcggcgaagtgaactatgcgctggaaggcgcggtgttcatcggcggtgcgtctatccagtggctgcgcgacgagctgaaactgatcagcgacgccgccgactccgaatatttcgccaccaaggtgaaagacagcaacggcgtctatgtggtgccggccttcaccggcctgggcgcgccctactgggatccgtatgctcgcggcgccatcttcggcctgacccgtggtgccaacagcaaccacatcatccgcgccacgctggaatccatcgccttccagacccgtgacgtgctggacgccatgcaggccgacgccaacacccgcctgcaatcgctgcgcgtggacggcggcgcggtcgccaacaacttcctgatgcagttccagtccgatattctcggcacccgcgtagaacgccctgaagtgcgtgaatcgacggcgctgggcgcggcgttcctggcgggcctggccatcggctactggaacgatctggatgaagtgaagagcaaagcggtggttgagcgtgaattccgcccaagcatcgaaaccaccgaacgcaactaccgctacagcggctggaaaaaagcggtggctcgcgctcaggcatgggaagatcacgagtaatcccgaagctgccgtttcgccaacaagcgctgcctgcgggcggcgctttttttttgccccgccctgccgccaccgcgctgtgatagactttgtcgatattttcctccctttctcacagacaggtttgccatgaaacgtgaattagccatcgaattctcccgcgttaccgaagccgccgcgctggcgggctacaaatggctggggcgcggcgacaagaacgccgccgacggcgcggcggtccacgccatgcgcatcatgctcaacaaagtggatatcgatgggcgcatcgtgatcggcgaaggcgagatcgacgaagcaccgatgttgtatatcggcgagcaggtcggtaccggtcagggcgacgcagtcgacatcgcggtcgatccgatcgaaggcacccgcatgaccgccatgggccagtccaatgcgctggcggtattggcggtgggcgatcgcggcaccttcctgcacgcgccggacatgtacatggagaagctggtggtcggcccggcggcgcgcggcgccatcgatctcaaccggccattggcagaaaacctgcagaacgtcgccgaacgactgggcaaaccactgtcgcagctgacggtgatcgtattggccaaaccgcgccacgacggcgtcatcgcgcagatgcagcaattgggcatgcgagtattcgccattcctgacggcgacgtagcggcctccattctcacctgcatgccggaaagcgaggtcgatgtgatgtacggcatcggcggcgcaccggaaggggtgatctcagccgcggtgatccgcgcgctggacggtgacatgcaggcgcgtttgctgccgcgtcatgaggtgaaaggcgacagcgccgaaaaccgccgcatcggcgaacaagagttggcccgctgccgggagatgggtatcgaagccggccaggcgctgcgtctggatcagatggcgcgcaacgacaacgtgatcttctccgccaccggcatcaccaagggcgatctgctggaaggcatcagccgccagggcaacatggccaccaccgaaacgttgctgatccgcggcaagtcgcgcaccatccgccgtattcgttcgacccactatctggatcgcaaagacccggcgctgcacgagtttctgctgtaacgaaacagggcgccgaatggcgccctgatgattgatgacaaacctcatgcccttgccgtgttggcagagaacagcgaataaaaaacaaggaaaatcaatctattgattttcggctgataaccacaaaggggagaaaaaccccgctttttctcccctttgtcaacggtatgagggcgccgaatggcgccctgtcgttatgcggtatgcccctgatgctgcatacgattggacagcggccaccagcacagcaggatcagcagcgccatcgcgaacatcagcaagccgaggctgaactgcccggtttgcggcaacatggcggacagccaggtcgccagaccggaccccatgttctgcatcccgcccaccagtgcgcccgccgcgccggccaggtaagggaacggctccatcgccccggtggtcgccagcgggaacagcatgccggcgccgaagaagaacagcgcggccggcacgatcagcgtccagatgttcatcacgccgaaccagcccgggatccacatcatcgcccccgccagcaggcagctaatcaccgaatgccacatcagcgtgtggaaggtcttgccgtcgcgcccggcgtaccaggcgccgaaaaacgccgccgggatcggcagaatgaacaggatgctgacggtcagcccactcagccccaacacgccgcccatcaacacgccgcagctggcctcgaataccgcaatccccgccagcgcgccgatcagcatcaccagatagcagctgaaggtgctgtcacccagcagctggcggaaactggccagcatgcgacgtttttccgtttgcaccgggcgggtttccggcagccagcggaacatggcgaaggcgacgcaggcgcacagcgccagcaggaaggcgtagcaggcgcgccagccgaacaccatcgccaatgcgccgccgatcaccggcgccagcagcgggctaaccaaaatccccatgttcaacaggctgttggcgtagcgcagggcggtgccggcatacagatcgcgcggcatggtgcgcgccatcacgcccgccacgccggtgcccatgccctgaatcgcgctggcggcaaccagcatcgtcaggttggtggacagcagcgcgcccagcgcaccgaccaggaagatcatcatgccggtcaggatcaccgggcggcgcccgatacgatccgatatcggcccgtaaatcagctgggagaaaccgtaggtcagcagatacgccgccatcacccgttgcacggcgccggtgcgaaccgacagatcgtgggcgatatcagcaataacgggaacataaatggtttgcgccatctggccgacggcgaccaacaggataagcatcaccagcaggtgaaaattctctagttttctcattatcttcgttaacgtttcaactcgtcacagcgtcccggtatggccgttgcagcagccagaacggcgagcagccctctatggcggcataaactaatcaaatctgatttttttagcgagtttcaggcagatattgatccaggtcacactggcagcaaacccgaccaggctcgtaaattaaactgtacgtctaacgctttggagttaaaaatagcgcccttgcagtagccgcgctttagcatttaatcgataattattttcatcaacttgaaataaaataacaccatagggatttggttcatgaaaacacctgagctgattttattgcagttaaaggctctcggcccgcactcggccaaaatgctggcggagcgtctggacatcacgccgatgggcatccgacaacatctgcaatccctggaaaaacgtgagttggtttgttacgaagaagcgcgcagcaaggtcggccgcccgacgcgctactggtcgctgacagcgcgagggcacgcttttgcggccgccgatcaggaacggctgcgggcatccgcgctgcggctgtttggcggcgccggcgtggaaccgttgctgaacgcgcgcgaagagcagctttatctgcgttatgccgaagagctgtctgccgagcgcagccaccaagagcggttagcccgattggtgcgtctgcggcaacatgatggttacatggctgaattgctcgatcatccgcacggtgcgctgttggtggaaaaccactgtccgatcggcgtggccggttccaactgcagcagcctgtgcaattccgagctgcagctgtttcaccgcctgttcggcaacgactatcggatagagcgcaccacgcacgccatttccggctcacgacattgtgcttatttgattcgaccacgggagctttagagtatggctgaatgggtaaacggcaaggttacgcaggtaaaacaatggaccgacgggctgttcagcctggtggtcaatgcccccatcgatcctttcaccgccgggcaattcgccaaactggcgctggagatcgacggcgaacgagtgcaacgcgcctactcctacgtcaatgcccccgatgacgccaacctggagttctatctggtgacggtgccggaaggcaaactgagcccgcgcctcaatcagctgcggccaggttcggatgtcatggtgactaaagaagcggccggattcttcgtgctggatgaggtgcccgactgcgacacgctgtggatgctggcgaccggcaccgccatcggcccctatttatcgattctgcagcaaggcgtcggcctggaacgctttaacaacctggtgctggtgcacgccgcgcgttttgcgcgcgatctgagctacctgccgctgatgcagcaactgcagcaacgctacaacggcaagctgcgcatccagaccgtcgtcagccgtgaagagacgcccggttcactgaccggccgcgtgccggcgctgatcgaggacggccggctggaagcggcgatcggcttgaccatcgacgccgaaaccagccacgtgatgctgtgcggcaacccgcagatggtgcgggacacccagcaaacgctgaaagaccaccgccaaatgcgcaagcacctgcgccgcaaaccgggccacatcaccagcgagcactactggtaacccgaggatcagcggaacttcaccggttcggcttccgggccgaaccgattgtctcccggcgtgccgacgaaggcgcccagatcgatagtcatcatcacgataatcagcgtcgggatgaaacgcccgacgccccattgccagatcggcgccagcatttgccagttgcccgccgccagcatccacgccaggatcagcagcaacgcccaccagccggccttgttgcgatcgtgcagacgtttgaccagcaccgccgccgtcggccagagcagcgccacgataaagaaggcgatggattggatggcgatcaattgataattggccagcgtaaacgccgccgccatcagcaccaaccacagccccatccagatccagaagtcgcgccgcccgatgcggcccttaaaagaaaaacaccactgttgtaacgtcatcgattcctgcgctctaagcctgcccatattctgcgccgcagtgtaacataggcgctgccgggccgagttttccgccttgcataacgcggcgcgccgcacagctttctcgtcagcgaaccgataatggcgtgggatctttgacaaggcctgcgggttatcgctttaatcggagccatctttgtccttgatgccatacgccatgctgagaaaaaccctcgccatcgcctgcctgctgcaggccgccgccagcgcctgggccgaaccgcccgccgccgaagcgaaaccgaccgcgccttacctgctggccggggcgccgaccttcgatctgacggtggtcaagttccgcgagaaatacaatcgcgacaaccccaagctgccgattggcgaattccgcgccattcccgccgccgaagacgattcgccgctgctgacgcgcgccgccagtaaactcaacgaaaacctgtacgcctccaccgcactggagaaaggtaccggtaaaatcaaaacgttgcagatcacgcatctgccgctgcagcaggccaatgaagaaaaagccgcgcgcgccatcgccatcaactacatggcggcgctgatgcgccagttcgaaccggcattgacggtggaacagagccagaacaaggtgaacagcctgctggaaaaaggcaaaggatcgcgcttttaccaacagcaggtcggcgccattcgctatgtcgtctcggacaacggcgataaaggcgtcaccttcgcggttgaaccgattaagctggcgctttccgagccgtaacggcgcggcatttaatgacgaaaagcaaagccttcgcgcttaatgatctctatactgttgggcaggtaaactgccggtccggcagttgtcatttcgactctcgcgttccctagttggaggaaaaaacatgcgtcatccattagttatgggtaactggaagcttaacggcagcacccacatggtcaacgaactgatcgccggtctgcgcaatgagctgagcagcgttgacggctgtggcgtcgccatcgccccgccggtgatgtatctggatcaggccaagcacgcgctggccggcagccgcatcgcgctgggcgcgcagaacgtggacgttaacctgtccggcgccttcaccggtgaagtttccgccaacatgctgaaagacgtcggcgctcagtacatcatcatcggccactccgagcgtcgcacctaccacaaagaaagcgacgaagtgatcgccgagaaattcgccgtgctgaaagaagccggcctgatcccggtgctatgcatcggtgaaaccgaagcggaaaacgccgcgggcaaaaccgaagaagtatgcgcgcgccagatcgacgccgtgctgaaaacgctgggcgcaccggcgatgaaaggcaccgtgatcgcctatgagccggtctgggccatcggtaccggcaaatccgccacccctgcgcaggcgcaggccgtgcacaaatttatccgcgatcacatcgccaagcacgatgccgcggttgccgctgaaatcatcatccagtacggcggttcggtgaacgacaagaacgccgcagagctgttctcccagccggacatcgatggcgcgctggttggcggcgcctcgctgaaagccgacgctttcgccgtgatcgtcaaagccgctgccgcagcgaaaaaagcctgattgccttaggcttgccataaaaaaaccccggcaagccggggttttttattgccgtttaaacggcatcagcgtttgctgatttcgtcgaatacgccgccggtggcgaagtgcaccttctgcgcttcggtccagccgccgaaggtgtcatctacggtgaacagcttcagctgcgggaactgcccggcgaacttggccgccaccgccgcatcgcgcgggcggtaatagtgctgtgccgcgatagtctgcccttccggcgaatacagatatttcaggtaggcggtcgccacctcacgggtaccgcgtttgtcgaccaccttatccaccaccgacaccgtcggttcggccaggatcgattcactcggggtgataatctcgaacttgtctttgcccaactctttctccgccagcagcgcttcgttttcccaggcgatcagcacgtcgccgatgccgcgctcaacgaaggtgttggtcgagccgcgcgcgccggaatccagcacctcgacgttcttgtacaggtttttgacgaagtcctgcgccttggccttatcgttgttgttgtggtgcaacgcgtagccccaggcggccaggtagttccagcgggcgccgccggaggttttcgggttcggggtgatcaccgacacgcccggcttgatcaaatcaggccagtcatgaatctgtttcgggttgcctttgcgcaccaggaagacgatggtcgaggtgtaaggcgccgaattgtccggcaggcgtttgatccagtctttctcgatgcgcccgcgttcggcgatggcgtcgacgtcataggctaacgccagcgtcaccacgtcggcctcgatgccgttgatcaccgacgtcgcctgcttgccggaaccgccgtgcgactggcgcaccgtcaccttgtcgccggtttccgcctggtagtgcttgctgaatgccgtgttgtaagcctgatagaactcacgcgtcggatcgtatgacacgttcagcaactgaatatccttcgccatggcgccggacgccaacagcaccaatgtcagacctacaccccatttacgcatcgacaggctctcccagaaaattaagcgcaacctcaatcggttgatttagcatcagagcctgccagaaactttcccggcaactaaagaataaaaaattttgggatagatgattctggaatatgtcaccggcgagcataaaaaagcccccgggagcggaggcttttttgtcgtgcggtaagtggcgtatcagtacagcttttttgccgtttccagccagtcgcccttgaacggacgcttcatgttttcgatcgcgtcgatgatgtcgtggtgcaccattttttcgttctggataccgacgcagcggccgccgtacccctgcagcagcagttcgatggcgtaggcgcccatgcgcgaggccaggatgcggtcataggcgaccggcgaaccgccgcgctgaatgtggcccagcacggtggcgcgggtttcacgcttggtttcctgctcaatgtggcgcgccagctcatcgatatcgcagatgtgctcggtgatcgccacgatggcgtgttttttgcctttggcgatgccggccttgatttcgcacaccagatcttcgcggttgaattcgatttcaggcagcacgataaattcgcagccgccggcaatcgccgccgccagcgtcagatcgccgcagtaacggcccatcacttccacgatggagatgcgctggtgcgacgaggaggtatcgcgcaggcggtcgatcgcttccaccacggtttccagcgcggtgaagtaaccgatggtgtagtcggtgccggcgacatcgttatcgatggtgcccggcagaccgatgcacgggaaaccttcttccgtcaggcgtttggcgcccatgtaggaaccgtcgccgccgatcaccaccagcgcgtcgatgccgcgattcttcaggttttcaatcgccttggcacgcacgttttcatccctgaactccgggaagcgggccgaaccaaggaaggtgccgccgcgattgatcatgtcggacacgctatagcggtccagctgctccatgcgatcttcgtataagccaaggtagccatcgtaaataccaaaaacttccagaccttctgaaagcgcagaacgcacaacgccgcggattgcagcgttcatacccggcgaatcaccgccgctcgtcagtacaccgattttcttgatcatgactacctctgaactgtgtagatgcaatttcttaagaattctgtctccgccgatcgtcttgaaacctctccggctgcagaaaaccagctttacggcttattgctggatattatatcaaaaacacccagctgaattgattcaagtcacgcaatataacggttaaaacaccgcatggcacgctgagctaactcagatattcatgataatacgttgcgctatgcctctatatgattatagctcccaatgcccctgcctacccggtggcaccacggagcacggatccaggtgaatgatgacatccgcccccgcaaaacgttgccgcagggcttgttccacctgatcggccaagcggtgcgcctcgcgcagcggcagcgtgtcctccatctccagatgcagctggatgaaacgcgtcggccccgactgacgcgtgcgcagatcgtgtgcgcctttcacgccgggccaggaggaaaccacggcgataatcgcctggcgctcgtcatccggcaacgcccgatccaacagcgactgcaccgcttcatagcccatgcgcagcgcgctatagaggatgtaaacgccgatgcccagcgcgaacaacgcatccgcccgttggaagccgtaccagcttagcccaagagcgataagaatagcaccattcatcatgacatctgactgataatgcagcatatctgcgcgcacggcctggctgcgcgtttttctgaccacccagcgttgataggtgaccagcatcagggtgctgactaacgcgatcaccgtcacgacgaccccaacgccgggatcgcgcagcgtttgcggtgcatacagatgctggaagccggtgagaaacagaaacagggcggaaccggaaataaacatgctttgcgccagcgccgccagcgactccgctttgccgtggccaaaggtgtgctcggcatcggcaggctgcagcgaatagcgcaccaccagcaggttggtcagcgaggcggcgatatcgaccagcgaatccaccagcgccgccagcaggctgacagaaccggtctggtaccaggcgacgattttgatcagcaacagcgacgacgccagcgcggtagcggccaacgcagcggactttaccaggcgtgcatagcgctgttccattgagggatcccggtcaaaaggtatggcgctcaatatagcgaaatgtcggataaaaaaaaccccgccatcatggcggggaagacagggatggtgtctatggcaaggaaaaacaggggactactcagtcgtacttcacttctgggcagaagcttgctgcaaaccagaaatttgttgctccatctgctgcatgcgctgctgatgtttctggtctaaaacacttttttgctctggcgtcagcaggttatacatttggttgcgcacccgggccatttcgacctggcgcttgacctgctgttgggccatcttttccgcctgggcatacacggcggcttcgtcaaatttctctgcggtcaccagtttatgcatggcttccatttcagctacattgacaccaggcagatcgtgccgggcctggcgcatcaaatcgcgcatttgctggcgctgctgttcgctgaggctgacaccgtcgaacatatggtgctggccgggtattcgggtcatcgcgtcgttgccgggaggttgggctgtgtccggtatagtgtcggcagcgaaggcagcggtcgaaccaattgccagcagtgatgccataactaatgcggtcaccttacgcatttcaactcctcaagctttctcactttgcgaatcaacgaggagcagtgtaccgccgcacctgaaaacctgcgtcagtgcatgtaaaactacgtaaagtcatggaatggcaacagttgatgacgtattttgcgtctggaggtaaatcataatgaacaagattctgttagttgacgacgaccgcgagttgacctcgctgttaaaagaactgcttgaaatggaaggttttaatatcgtcgtcgcgcacgatggcgagcaggcgttgtcgctgctggacagctccgtcgatctgctgctgctcgacatcatgatgccgaagaaaaacggcatcgatacgctgaaagaactgcgccaacatcaccagacgccggtcatcatgctgaccgcgcgcggcagcgaactggaccgcgtgttgggcctggagctgggcgccgatgattacctgccgaaacccttcaacgatcgcgaactggtcgcgcgcattcgcgccattctgcgccgttccaactggagcgaacagcagcagcaggtcgacagcggcgccccgacgctggatgtcgatggcctgcagctgaaccccggccgccaggaggccagcttcgacggccaggtgctggatctgaccggcaccgagttcaccctgctgtatctgctggcgcaacatctcggccaggtggtgtcgcgcgaactgctgagccaggaagtgctgggcaaacgcctgactccgttcgatcgcgccatcgacatgcatatctccaacctgcggcgtaagctgccggatcgcaaagacgggcatccgtggttcaaaaccctgcgcgggcgtggttatttgatggtatctgcaacatgatcaacagtttgacggcacgcatcttcgccattttctggttcacgttagccctggtgctaatgctggtgctgatggtgcccaagctcgactcccgccaaatgacctcgctgctcgacagcgagcagcggcaggggttgatgctggaacagcacgtcgaggccgagttgcaaaacgatccggccaacgatctgatgtggtggcgccgcctgttccgcgccatcgacaaatgggcgccgccgggccaacgcctgctgctggtcaccagcgaaggccgggtgatcggcgcgcagcgcaatgaaatgcagatcgtccgcaacttcatcggccaatccgacaattcggatcatccgaagaagaaaaagtacggccgcgtcgaactggtcgggccgttcgcggtgcgcgacggcgaagacaactaccagctgtacctgatccgccccgccaacagcccgcaatccgatttcatcaacctgatgttcgaccggccgctgctgctgctgatcgtcaccatgctgatcagcgccccgctgctgctgtggctggcctggagcctggcgaaaccggcgcgcaagctgaagaacgccgccgatgacgtggcgcgcggcaacctgaagcagcatccggaactggaggccggcccgcaggaatttctggccaccggcgccagcttcaaccagatggtcagcgcgctggaacgcatgatgaacgcccagcaacgcttgatctcggacatctcgcacgagctgcgcacgccgctgactcgcctgcagctggccaccgcgctgatgcgccgccgccacggcgaaggccacgagctggcgcgcatcgaaaccgaagcgcaacggctggattcgatgatcaacgatctgctggcgctgtcgcgcgggcagcagaagggcgagctggcgcgcgagcagttgaaggccaacgaactgtgggccgacgtgctggataacgcccgtttcgaagccgaacagatgggcaagcagctggagatcgctgcgccgcccggtccgtggacgctgttcggcaacgcgagcgcgctggacagcgcgttggaaaacatcgtgcgcaacgccctgcgttattcgcacacccgcatcgccgtggcgttcagcgccgacaatcagggcgtgactatccaggttgacgacgacggccccggcgtcagcgccgaagaccgcgagcagatcttccgtccgttctaccgcaccgatgaggcgcgcgaccgtgagtccggcggcaccggccttggcctggctatcgtcgaggcggcggtcaatcagcatcgcggctgggtgaaggccgaagacagcccgcttggcggtctgcggctggtgctgtggctgccgctgcatcatcaacgcctatcgtctaagacagaacagtaagagtttgctatcctgcgcccctcgttcacgaggggcctgcaacatgctgaacatcgttttatttgaacccgaaattccacccaataccggcaatatcatccgcctgtgcgccaataccggctttaatctgcacctgatcgaaccgctgggtttcccgtgggacgacaaacgcctgcgccgcgccgggctggactatcatgagttcacccgcgtcagccgccatgccgattacgccgcctttctcgccgccgaaaacccgcagcggctgtttgccctcaccaccaaaggcacgccggcgcacagcgccgtcagctaccaggccggcgactacctgctgttcggcccggaaacgcgcgggttgcctgccgacatcctcgatgcgctgcccgcgcagcaaaaaatccgcatcccgatgcaggcgcaaagccgcagcatgaacctgtcgaatgccgtatcggtggtggtgtatgaagcctggcggcagctgggctatgccggtgcgctgatcaaggcgtaatccgcgacgtcgcgccatactggaagagtcatcctttccaggcacggcatatggctttcgtcgcagagattgtcacccagcttcgccggctcgaaccggcgctgaacgaggcgctgttgcggctgcaacaggcgcaagacagcgaagcgctgcacgacttgcgcgtctgtctgcgccgcattcgcagcctgctgcgcccgttacgcggctgccccggcgcaacccggctcgatcgggccgccgccgaattgggcaggctcacgacgccgctgcgcgatctcgaggtgctgatcgccgaactggcgcgacatcgcctcgattggcaggccaacgtgcgccagagcgaatttcaggcccgctaccgtcaactgctcacccatccgcagctcatcggctttccctcgcttttgcacgcctggccgcgccgctttcgccgcagcgcgcaacgcgtcgccaaacaccgcctgaataaacacctgcagcgccaacaacggcaattgcgccgggcattggccgataccggctacgatcgccaccgcctgcggctgctgataaaacgcctgcgttacgcggctgaagcctatccgcagcgccttcccctctcccccgccgcgatggcgagcctgaaagcggcgcagaacgccctcggtgattggcacgaccgggaggtttggtgcctgcaagccgaacatcaggcggatctctggcccttgttgccccggtggcaagctgagcaacgccaggcgctggtcagcgcggacgccttgctcgccgccttatcaccggcactggcggcgaaaaccggcggcgcatcacgatcctgaaaaaaggccgcagcagggcacgcccggccccgaaaaagcccgatgaggcgcagataatgcgctatgttttgtaagggtaatcaccactcatcataggaaaccatatgaagaaacaacgtttgagcgttgccatggcggttctggcggcgggcctgttgctggcgggctgctcgtccaaagtcacccaaacgaatcaatattcggggttcctaccggactacagcaagctgcaggaaaccagctcgccaagcggccataaaacgctgcgttggatcgatcccacctttaaagagtcgaattatcgcggcgtgtatgtcgctcccgtggtttattacccggcggctaaacccaccgcccgcgtcagccaacaaacgctggacaaaattagaaactataccgaccaaagcgtgagaaaagcggtggccgagcgcactaccgttttgaataacccgacaggttcccgcgtgctgttggccaaagtcgcgattaccgccgtgtctgccgaagatgaggatatgaaattctatgaagtggtgccggtagcggccgtggtggccagcaccatggccgccactggccaccggacgcaaaacaccacgctgttcctggaagcgcagttgatcgatcaggatagcggtaaaacggtgctggaagtggtgcgcaagagttacggcaaaaccgtcaacaacgacagcgcgccagtcacggaacaagaagtcaaagcggcgatcgatgacatggtcaacgacatcgtcacattcccgaaacagggctgaccgccgcctgaaaaacacagggggagccgaagctccccctgaatggacccgcaggcgcggcttagatgccgtcgccgtactcgaagccgtggttggtgccgttgaagtattggtccatatccatcgacggcgtatcgctctccggccgcccgacgatgcgcgccggcacgccggcggcggtggtgtgcggcggtatcgcctgcaagaccaccgagcccgcaccgatcttcgcgcccttgcccacttcgatattgccgagaattttggcgcctgcgccaatcatcaccccttcacggattttcgggtgacggtcgccgctggttttaccggtaccgcccagggtgaccgattgcaggatagagacgttgttctccaccaccgccgtttcaccgatcacgatgccggtggcgtggtcgagcatgatgccgcaaccgatggtcgccgccgggtggatgtctacgccgaaggcgacggaaatttgattttgcaggtagatagccagcgcctgccgcccttgctgccacagccagtggccgatgcggtaagcctgcagcgcgtggaaccctttcaggtaaagcagcggcgtggagtatttatcgaccgccgggtcgcgcaggcgcaccgcgaggatatcgcgcgccgccgaaacgatcatctggttgtcagacttgtaggcctcttccaccacctcacgcaccgcgatggcgggcatgatcggcgtggccagcttgttggccagcatatagctgagcgcgctgcccaggttctcgtgcttgagcaacgtcgcatggaaaaagctggccagcatcggttcacaatcagccagtgctcgcgcttctgatttaatgctgttccagacctgttccaactcttctgacgacatcacatacccctttaccttgccaaacgggccgcttcacacggtagcgcgaagcggcccaggtcatttgcggggtcagcattccgctgccccgacatatcgttttatgtcacgcgctgggtttttcgtcctttcgggctcgccccagcaggctcagcgccgcttcgcgggcgtccttgtggcagtaaagcacctgataaatctgttcggtgatcggcatttccacaccgtgccgctgcgccaacgccaacacctctttggtattgcgatagccctcgaccacctgaccgatactgtcctgcgcttcctgcacgcctttaccctgccccagcataatgccgaagcgacggttgcgcgactggttgtccgtgcaggttagcaccagatcccccagccccgccatgcccatgaacgtcgagggatcggcgcccagcgcagaacccagacggctcatttccgccagcccgcgcgtaatcaacgcggtacgggcattggcgccgaaaccgatgccgtcggacatgccggcgccgatggcgatcacgttcttcactgcgccgccaagctgcacaccgatgaagtcgggattgctgtagacgcggaaactcttgccgcagtgcagcagctgttgcagatcgtcggcgaactgcgcatcggtcgccgccagcgcgattgccgtcggcaggccggcggccagctctttggcgaacgtcggcccggagagcaccgccagcgggatcgcctcgcccaacgcctcacgcgccacgtcctgcagcaagcggccggtttccgcttccaaccctttggtggcccacacgatgcgggcatccgggcgcagatgcggcttcagctggcgcagcacgtcgccgaacacgtggctcggcaccaccaccagcacgtcgcggctggcggccagcgcacgcgccaaatcggcttcgagcagcagggtatcggggaagggaacgtcaggcagaaacgcctgattgcagcgatcgtgctgcaacgtttgaatttgcgcggggttatgtccccacaacaccacgggatgaccgttacgcgccagcgtaatggccaatgcggtgccgtacgagccggcaccgataacagtcattgaagcattgacggtgttcatcaggcatcctgatgtggtgcggcaccttcgccttccgcctgctgctgcagatagttcatgaacagcgcgtcaaagttgaccggtgccagattcagctgcgggaaggtgccgcgggaaaccaggctggtgatgcactcgcgcgcatacgggaacaggatgttcgggcagtatgcacccaggcaatgcgccagctgcgtgccttcgatgcctgctaccgagaagatgcccgcctgctgcacttcgcacaggaacgcagtctcttcgcccagggtcgccgtcacggttacgcgcagtaccacttcatacacttcgtcagccagctggctggacgcggtatccagatcaagtttaacttccggctgccattcctgctggaaaacctgcggcgcgttcggcgcttcgaaggagatatccttggtatagatacgttggatctggaaagccatttcggtgctgttttgttctgacatgtgagtaatacccttggttaaacgtccttattgacactcggtgaaccggcaagctgcttaaagcagcggatccaggccgccgcgagcatcgagttcatataaatcatcgcagccgccgatatgccggccgtcgatgaaaatctgcggcacggtggtgcgcccgctgcgctcgatcatcacttcgcgcttggcgttatcgccgtcgatggcgatctcgttaaacgccgcgcccttgctgttcaacagcgccttggcgcgatggcagaacgggcaggtcgctttggtgtagatatcaatgttagccatggattgccacctcaaataggttaaacggttacttaccgcgcaccagcggcaggttttctccgctccagccggcaatgccgtctttcagcatagtcaccttttcaaaaccggccttgctcaggttctccgccggctcgcgggaggcggtgccgttggcgcacacgacgatgatcggctgcgctttgtgtttttccagctcgcccaggctgccgtttttgatttcgctggcggtcaggttgatggcgttggccaggtgaccacggcggaaatcgtcgcggctgcgggtatcgaccaccacggcttcttctttgttgatcaggcgaatggcttcaccgcgggcgatctctttgaccttggagaaacggcttttgaaggtcatgacgatcacggcgaccagcagagcgatccaagccaggctcagaatagggtgtctgcttacgaatggcataatttcttgcagcatggggtgtaacaactcccgtcagttaagggataaataagtcaaggttccagagtatacctgccgagtgcggcaaatacagccaataagcaagcgcgattgtagaaactgcgggctgcgctgagaaattcccgaggtcagagcataaaagcccgcgcgattcgccgcaaccttgatctctttgggctatttatcgccggcggcggtgtaaaatcagccggtttttcgagggcgaatagccatgcttgcggcgggcgcatggctattcgcagcttaaaaagttcataagaggtcaatgcaatgtcgaacaacaaaaaaccgatggtcctggtgatcctggacggttacggccaccgtgaagagcgacaggacaacgcgatcctgaacgccggcaccccggtgatggatcgtctgtggcgggagcagccgcatacgctgatcgccgcctccgggctggatgtcggcctgcccgatgggcaaatgggcaactccgaagtcggccacgtcaatctgggcgccgggcgcatcgtgtaccaggatctgacccggctggacaaagcgatcgccgacggcgacttctttaccaacccggtgctgaccgccgccgtcgataaggccgtagcggccggcaaggcggtgcatatcatgggcctgctgtcgccgggcggcgtgcacagccatgacgagcacatcctggccatgatcaagctggccgcccaacgcggcgccaaagccatttatctgcatgccttccttgacgggcgcgacacgccgccacgcagcgccgaagccccgctgcaacgctgccgcgacgccttcgccgcgttgggcgtcgggcgcatcgcctcgctgatcggccgctactacgcgatggaccgcgacaaccgctgggatcgcgtgcagctggcctatgacctgctgaccgcggccaaaggcgattccgtggccgaggatgcgatcgccggcctgcaggccgcttatcagcgcggtgaaaacgacgagttcgtcagaccgaccgtgatccgcgccgccggtgaggccgatgccgcaatgcaggacggcgacgcgttgatcttcatgaacttccgcgctgaccgcgcgcgccagatcacccgcgctttcgtgaacgccgacttcgacggtttcccgcgcgccaagcaggcgcagttcggcgatttcgtgatgctgaccgaatacgccgccgacatcgcgaccgcctgcgcctatccgccggcgccgctggccaacaccttcggcgaatggctgatgaagcacgacaaaacccagttgcgcatctcggaaaccgaaaaatacgcccacgtcaccttcttctataacggcggcgtggaagcgccgttcaagggcgaagaccgcgtgctggtcaactcgccgcaggtcgccacctacgatttgcagcctgagatgagcgccgccgagctgaccgacaagctgctgaccgccatccgcagcggcaaatacgacgccatcatctgcaactacccgaacggcgacatggtggggcataccggcgtgtatgaagcggcggtcaaagcggtggaaacgctggacgcctgcatcgcccaggtggttgatgcggtgcgcgacgtcgacggccaactgctgatcaccgccgatcacggcaacgccgagcagatgcgcgatccggccaccggccaggcgcacaccgcccacaccagcctgccggtgccgctgatttacgtcggcaaaccggcgcgcgcggtcgaaggcggcaagctttcggacatcgcgccaaccctgttaacgctgatgggaatggaaatcccgcaagagatgactggtaagccgctgttcatcgtggaataatccttctccatgagggagaaggcgttttttgcactatcaagggtaacccgaagcgcaaacgcaggcagccggccgctgcctgaacgcaccgcgccaaggacgttcaccgccatgtgcgccagcgtattttgcgctggcgtcttgctgttgccgctcgccggccaggcggcggaagacaataaatcccagctgaaagacatccagcagagcatcgccgagaaagaaaaggcggtgaagcagcagcaacagcagcgcagctcgctgcaggatcagctgcgtcaacaggaaaaaaccatcgcccaggccagccgccagttgcgcgacacccagggcacgctcacccagttgggcaaggacatttccggcctgaacgcctcgatagccaaactgcaaaaacagcaatcgacccagcaaaacctcctcgccaaacagctcgacgccgccttccggcaagggcagcacagcgccgtgcagctgatcctcagcggtgaagaaagccagcgcagcgaacgtattctggcctatttcggttatctgaacgaagcgcgccagaaaaccatcgaagagctgaaacagacccgcgccgagctggcgaagcaaaaaaccacgctggtggccaaacagggccagcaaaaatccttactgagcgaacaacagacgcagcagcagaagctggagcaggcgcgcggcgcccgcaagaaaacgctgaccgcgctggaagcctcgctggaaaaagaccaacaacgcctggtggaactgcgccaaaacgaagcccgcatgcgcgacaagatcgcccgagcggagcgcgaagcccgtgcgcgcgccgaacgcgaagcgcgtgaagcggccaaggtgcgcgaacaggtgcgcatcaaggaacagcaggcgaagaaaaccggcaccacctacaaacctagcgaagccgatcgctcgctgatggcgcgaaccggcggcctcggtcgtccggccggccagctgatgtggccggtgcgcggccgcacgctgcacggctttggcgagcagcagcagggcgagctacgctggaaaggcatggtgatcgaagcccgcgaaggcagcgaagtgaaagccgtcgccgatggccgcgtgctgctggccgactggctgcaaggctatggcctgatggtggtggtcgaacacggtaaaggcgacatgagcgtgtacggctacaaccaaagcgcgttggtcaacgtcggggcgcaggtgcgcgctggccagccgatcgctctggtcggcaccagcggcggccagggaacgccgtcgctctatttcgaaatccgtcgtcagggacaggcggttaacccactgccgtggttgggaagatagatttgcgttatgtcaaaacccgtacagctttgttaatcggctgtctgctgcaggtttacgctgcgcaggcaggaaaactctccatcgtcatcgatgacgtgggctaccgccctcacgaagaaaacgcggtgctgcaaatgccgacggcgatctcggtcgcagtcttgcccaacgcgccgcatgcccgcctgatggccacccgcgcccacagccagggccgcgaagtcttgatccacatgccgatggcgccgctcagcaagcagccgctggaacgcgataccctgcagccttccatgagcagcgacgagatccagcgcatcatccgcaacgcggtgaacaacgtgccctacgcggtcggcatgaacaaccacatgggcagcgccatgacctccagcctgccgggcatgcagaaagtgatgcaggcgctcgaaagctatcgtctgtatttcctcgacagcatgaccatcggcagcagccaggcgacccgcgccgcggccggcaccggcgtgaaagtgatcaaacgcagggtgttcctcgacgataccgcgaacgaagccgatatccgccgtcagttcaaccgcgcggttgaattggcgcggcgcaacggttccgccatcgccatcggccacccgcgcccggcgacggtgaaagtgctgcagcagatgctgccgtcgctgcccgccgatatcgtgctggtcaaaccgagcgcgctgctgaacgaaccgcagggcaacggcggtggcagctacgttccgccgccggtcaaaccgcaaaaaccgcagccgaagaacccgttcagcggcggcatcaagcagtgcaaggtcaaaccgccgaaggaaaaagccaacgccggcaccgcgctgggcgttatcgccgacagcattgccacctcgccgccggtgaccttcatcaagcgtcattggcagcactggacgcaaaccaaaccgcaagcataaaaaaagggccggaattccggcccttttcacgcctgccgagatcaatcccagctcagcaccactttgcccgatttgccggagcgcatggcgtcgaagccctgctggtactcgtcgatcgagaaacggtgggtgatgatcggggtcaaatccagaccggactggatcagcgccgccatcttgtaccaggtttcgaacatttcgcggccgtaaatccctttgataaacagccctttgaagatgacctgattccagtcgatcgacatatccgaaggcggaatgcccagcatggcgatacgcccgccgtggttcatcgcattgagcagcgtgcggaacgccggcggcgcgccggacatttccaggccgacatcgaacccttcggtcatgcccagttcggccatcacgtcgctgaggttttccttgctgacgttcaccgcacgggtcacgcccattttgcgcgccagttccaggcggtattcgttaacgtcggtgatcaccacatggcgggcgccgacgtgtttgcacaccgccgccgccataatgccgatcgggccggcgccggacaccagcacgtcttccccgaccagatcgaacgacagcgcggtatgcaccgcgttaccgaacggatcaaagatcgaagccagttcatcggagatgttatccgggatcttgaaggcgttgaacgccgggatcaccaggtattccgcgaagctgcccgggcggttcacgcccacgccgacggtgttgcggcacaggtgcgtgcggccgccgcggcagttgcggcagtggccgcaggtgatgtggccttcgccggacacgcgatcgccgatgttgaagcctttgacttcctgaccgatcgccaccacttcgcccacgtattcatggccgaccaccatcggaaccggaatggttttttgcgaccactcgtcccagttgtagatatgcacatcggtgccgcagatcgcggttttgcggattttgatcatgatgtcgttgtggcccagctccggctgaggcacgtcggtcatccaaatcccttcttccgctttcagttttgacagtgctttcatggttttaccttatgcaataacgccaagatccttaccgatacgtgtaaacgccgccactgcgcgttcgatttgctccggggtgtggtcggcggacatctgggtgcggatgcgcgcctggcctttcggcaccaccggatagaagaaaccggtcacatagatgccttccttgagcaacgcattggcgaattcctgcgccaacttcgcctcacccagcatcaccgggatgatggcgtgatcggcgccggccaacgtgaagccggcggcggtcattttttcgcggaacagacgcgcattggcccacaggcgatcgcgcagggcatcgccctcttccagcagttccagcactttgatcgacgcggcgacgatcgccggcgccagcgagttggagaacaggtacgggcgcgaacgctggcgcagccactccaccacttctttcttggcggcggtgtagccgccggacgcgccgcccagcgctttgcctaacgtaccggtgatgatatcgacgcggcccatcacttcgcagtattcatgggtgccgcgcccgttggcgccgacaaagcccaccgcgtgagagtcatccaccatcaccaacgcctggtattcgtccgccagatcgcaaacccctttcaggttggcgatcacgccgtccatcgagaagacgccgtcggtggcgatcaggatgtgacgcgcgccgtcggctttggcctgcttcagctgcgcggccagctcggtcatgtcgttattggcatagcgataacgcttggccttgcacaggcgcacgccgtcgatgatcgacgcgtggttcagcgcatcggagataatggcgtcttccgggccgagcagggtttcgaacagcccgccgttggcgtcgaagcaagaggagtacaggatcgcgtcttccatgcccaaaaaggccgccagtttctgttccagctgcttgtggctgtcctgggtgccgcagatgaagcgcaccgacgccatgccgaaaccgtggctgtccatgcccgacttggcggcggcgatcagcgccgggtggttggccaggcccaggtagttattggcgcagaagttgatcacatggctgccgtcggcgacggcgatatccgcctgttgcgcggaggtgatgatgcgttcttccttgaacagcccttcactgcgcgtggcggcaagctgttgttccaactgctgataaaaagacgctgacattcggttatctccaggattgggctatttgcggcatattttactgatttgtaaccaaactgacgagaatgcgcgggagagaatattaaaattgcagcagatatcacggcaaacggcggacttcaatggcaatgcgggatattcggagcccttccgctgtttgccgcggcatgaaatgctattataaccgccattgagcgtggggcattgtgccccgccaggcagcttagcaggggtaacccaatgattatcgtcacaggcggcgccggcatgatcggcagcaacatcattaaggcactgaacgacaagggatatcgcgatatcctggtggtggataacctgaaagacggcaccaagttcgtcaacctggtcgatctggatatcgccgactatatcgataaagaagactttatcgccagcatcgtggccggcgacgatctgggcgagatcgaagcggtgttccacgaaggcgcctgctccgcgaccaccgagtgggacggcaagtacatgatggacaataactatcagtactccaaagacctgctgcactactgcctggatcgcgaaatcccgttcttgtatgcctcctccgccgccacttacggcggccgcgaagagttcatcgaagagcgtgagtatgaagcgccgctcaacgtttacggctactccaaattcctgttcgatcaatacgtgcgcgagatcctgccggaagcggactcgcagatctgcggcttccgctacttcaacgtttatggcccgcgcgaaggccacaaaggcagcatggccagcgtcgccttccacctgaatacccagatcaaccgcggcgaaaacccgaaactgttcgccggcagcgaaaacttcaagcgtgacttcatctacgtcggcgacgtggcggcggttaacctgtggttctgggaaaccggcaaatccggcatcttcaactgcggcaccggccgagcggaaaccttccaggcggtagccgacgcggtggtggacttccaccagaaaggcgctgtggaatacatcgagttcccggagaagctgaaaggccgctatcaggcgtacacccaggccgatctgaccaagctgcgcgcggccggctacgacgcaccgttcaaaacggtcgccgaaggcgtgaaagagtacatggcctggttgaaccgcaccgcataagctgaaggaattaacgctgggtatgaaaatactggttatcggcccttcttgggttggcgacatgatgatgtcgcaaagtctctatcgcaccctgaaggccgaatacccgtcggcggagatcgatgtgatggcgccggcctggtgtcgcccgttgctggcgcgcatgccggaagtcaatcaggcgctggcgatgccgctgggccacggcgcgctggggctcggcgagcgccgccgcctggggcgcgctctgcgcgccaaccgttacgatcgcgcttacgttctgcccaactcgttcaaatccgcgctggtgcctttcttcgccgatatcccgcagcgcaccggctggcggggcgaaatgcgctacggcctgctgaacgacgtccgcgtgctcgacaaggccgctttcccgctgatggtgcagcgctatgtggcgctggcctatgacaaaggccgcgttcagcgcgccgacgatctgccgcagccactgctgtggccgcagctgcgggtgagcgacgaagagatcgccgacaccaccgcggccttcaacctgaccgacagccgcccgatcgtcggcttctgcccaggcgcggagttcggccccgccaagcgctggccgcactatcactacgcggcgctggctcagcggctgatcgagagcggctatcaaatcgcgctgttcggttcggcgaaagaccatgaggccggcgaacagatccgcgccgcattgcaggaagacgcgcgcgatttctgccttaatctggccgggaaaacccagctggagcaagcagttatcctgatcgcagcctgccgggcggtggtcagcaacgactccggtttaatgcacgttgccgcagcgttgaacaaaccgctgatagccttgtacgggccaagcagccccgacttcacaccgccgctttccgacaaggcgcgggtcattcgcctgatcagcggctaccacaaggtgcgtaagggcgatgccgagcagggataccaccaaagtttgatcgatattcagccgcagcaagtgttggatgcgctgacgccgttacttgtcgccagcgaggaatagtcatgcaggtgttaattgtaaaaacctcctcgatgggggacgtgctgcatacgctgcccgccctgaccgacgcgctgcaggccattcccgatatccgcttcgactgggtggtggaagaaggcttcagccaaatccccacctggcacccggcggtagatcgcgtgatcccggtggccattcgccgctggcgaaaaaactggttcggcaacgatactcggcaacagcgctgcgacttcaagcgcgcgctgcaagaacgccgttacgacgtggtgatcgacgcgcagggcctgatcaaaagcgccgcgctgatcacgcgcatcgctaaaggcaacaaacatggcccggactgcaagagcgcgcgcgagccgttcgccagctggttctacaatgtgcgccatgaggtagacaaacagcagcacgcggtggaacgcacgcgcgaactgttcgccaaaagcctcggctacgataaaccgggcagctacggcgattacgccatcgccgcacgctttctcagccgcccgccggccgatgccgggcagtatttggtgtttctgcacgcgacgacccgtgacgataagcattggccggagcaaaactggcgtgagctgatcgcgctggcggcggacagcgggctgaagatcaaactgccgtggggcgcagagcatgaacatcagcgcgcgctgcgcttggcggaaggttttccacatgtcgaggtgctgccgaaactcagcctgcagcaggtggccgaggtgctggccggcgccaggggagtgatctcggtcgacaccgggctcagccatttgaccgccgcgctcgacaaaccgaacatcacgctgttcgggccgaccgatcccggcctgatcggcggttacgggcaaaatcagcactcgctgatttcgccggaaaaaagcatggcgacaatcgacgccgatacggcatggcaggcgctgcaaaaggttatagcatgaaaaaactgcacattatcaacctgggtaaaatgggcggcgtcgagcgcctgttcctgcagtacatcaacgataccaccgacggcagcaaccaggtcctgtgcatcagcggcgacattggcgaagagatccgccgccagttgccggcgcatcagcccgtcaccttcgccaaccgcctgatcaatgcgttgccgttgcgttgcccgcagttcctgcgcaaatttttgctgaaatggaaaattgaacgggcgaacgccgacgtggtgatcgtctgggacctggtgccggggctggcggccaaacccaagcgcggcaagctggtttactacgatcacggctgctcctggcgttaccccaagaataaaaagacgctgcgtttcttcgccatgctggacggcgtgatttccgcctcacacgcgtcgaagcgggtgatggagctgcgctttaatctgccttgcccaaatcacgtggtgatcaaccgcatcaagacgccggcggggatcgacgctgcgccgaaaacgctgtcgcagccggtcaggatcggcactgcctcacgcctggtcagcctgaaaggcatcagcgtttcattattgatgatgcaggaactgctgcggcgcgggcatgacgtcacgctggaagtggccggcaaagggccggatcgcgcggcgttcgaggcgctggcggcacggcttcagctcggcgatcgcgccaccttcagcggttataaggatgacgtcgccggcttcttcaatcgcacgcacatctacatgagcacgccgatcaccgagccgttcggcttgtcctgcatggaatcgctctatttcggcgtgccggtcatcttcccgcaggtcgacggccagccggaagcggtcagggacggggtctgcggccttggcctgacgccgtcggtcaccatcgaacaacaccggcagctcaccgatatcgaggtcgacttcccgcatgaggtctacgatccgcagaccgacagcctggtggcgcccaagctgctgtcgcatatcgactgtgcggatgccgttgagaaattgctggagcgagaaacctaccagactctgagccgaaatgcgcagcgctatcctgcggagcatttcaactatgctcagttcaaagttgagttcgacgacacgctgcgctccttcatcgcttaattaaaacgtgagccggaaaacacgcccaatgttaaaacacagaacaccgcaccctgccttcagctatttaatctatctggggtgcgccatcgctttttgcaccattcctttcggttccgcgaccggacgcaatctgttttatgtttccagctacatcgcctttatcgccgtttgcctgtatccgcgctattacctcagcaacgttaaaaatctgctgttgccggcgctgatgttcagcgtcggcatggggaccatcctctggatgcaccacttcaaacagccgggtgaatacatcaacatttaccgctcttatatgtcgaccggtaaactccaactggcaaccgccttcatcctgctgattgcgcttaatgagcggttgtgcgtgcagcgcctgctcgttgtcgtggccctcattaccggtctggcggtcaacggttattcactctatcaggggctgcggctggatattccgcgcgtggagctcaacttcgatcgcgccacggtcgttgcctacctgatgaccgccatcgatctggtgatgatgcaagccatcctgatgctgcgcacccgctaccgtctggtgttgtacattgcggcgttcctgctgtccttctctgcgctggtgctcaccggcacgcgcgcggccatgttggtttacccggtggcggtttgtctgtcgctgctggcgaccaagcatctggtatccagaaaacacaagtttttgctggtctcctcggtgccattattgctactcatctgcggattcgtctttaaagcgcagattgaacaacgcattgccgacttcaaaaccaacatgcaactgatcgataaacctgagatagataactcgatcatttcccggctgtcgatgcaaacgctggcatggcgtaccggttcacaagcgccttggggccaatccgccgaacaacgcggtgaagagatccgcgccatcgtcgcgcagcagccacatctgtacggcgtcatgccctacatcaacgtccacctgcacaacgaactgctggaaacctactcgctcaagggcgtctggggcgtactgctgctgctggcgctgtatatcggcctgttctgctcttcgttccggccgcagcgcaacgcgttactgctgagcgtcagcgccagcctgttcgtttacggcctgagcgacgtcatcttcttcagcacggaaggcaccgtcatgttctgtctggcgctgatcgccgccgttctttccgttacgaaacagcccccagttcaggagcccaccttgtgaatcctcagcagccgctgctcagcgttatcgtgccgttttataataatgaagcgttcgttatcgctgcgctggattcgttatttgtacagattagcgacgatatcgaagtggtgatcatcgacgatggctctaccgatgcgtcaggggcgctggtcagccactatctggcgcagcggcggcacccgcgcgcggtccttacttcgcaggccaacggcggcattgcgcacgcccgcaacgtcggcctacagcaggccaccgggcgctatatcacctttctcgacggagacgatctgctgagcgacgactatctggcgatcctgcgccccctgctgatcgccggtgaatatgacctgatcgattttaattatcagaagttcaccgaacatccgtcgacaccggataaccgcgcggcgcagaccgtagcctacgacttttcacagttggggctcggctgcctgcaaccgctgtttgcacgttcgatgtggcatctctggagccgggtatataaacgcacgctgctggaaggggaggcgttcgaagacggcaggcgctacgaagacgtgattttcacgccttttcagtatttcaaaactcgccgcatcgcccatcttgactgcgaactctacttctatcgggacaacagccagggcatcacccgcaatatcaaacccaaagatattgaagatctgctgttcgccatggagaagatgctgcgttttgtggcgcagcatcccggggatgagccgctgcgccggttagccgccctgatgctggccaactgcttttccgaggtgaaaagcatgtcgaaggcggtatacggctattaccattacgcaccggcaacgctgcatatcctgcgccgcgccgccgctgtctgccgcaacagcgacgtgccgggcaaaaaagtccgccagatgcgctatgcgcgagtagatacctttctttcgaagctgcgcgggcgcaggccgcactaatcgcatcggccgggcggccgatgcgtcgtctcgcctttagcgcgctaaaggcacgtgcgcgaccagctcgtcataaatccgctgcggctggataacccccatcgggctttccgcctccagcggcattgtataaccggtacgagacacctgaatgatgcgatgcagttcaggatcctgaatcggcccggtggagcgtgagtcggcggtcacgaacagactgatggttttcaccttcaatgccactgccagatgcagcggcccggtatcgccggtaaccagaacatggaaactgtcgagcaacgtcagcaaaccttgcagccccgttttaccgatctggttatccacgcaggcctgcgtttgcgggccgatcagactcaaaaactgtttggccttgccgtcgtcaaacggtgcgccaatcagcacgatgcgtacatttgggtgcttcgccaccagctcatcggccagccgcgcatagtgcgcaaccggccagcaacgcgactccgttgacgcccccagctgaaaaccgatggtgggatgctcgctgcttttgacgccgcgctgataatccacgggaatttccatcgtcggatcgtcgctgcggcagcccaaaatggaaatcagctccagcttgcggcgcacgaagtggccgtaataatggaagacgtagttggttagccaaggctccagcccgcaaatgcctgaactgtagttatccctgataatgtacttagccccggccagtacggcgctgatgatgtcataaggcaggtgagagtgcaggatcagcgccaaatccggctgatgttcgcgcagcgatttcagcaacgggcgcatcgtcttgatcttgctgtcccaatacaccacgcgatcgtaatagcggccgttttccaccagctcgcggtttttcttgtgcaccaccagcgtgatgtgcgcgttggggtagcgttcccgcatcgcccgcagtgccggcgtgttgaacatgaagtcgcccaacgccgtggtggaatagatgacgatattgtcaaactgctgggcgccgtcgaacgtcgccttgtcctgaaaacggccgtacttcgccgtatagcgccgcaagaaccagtcggcaaccttgattttccatttcttcgacatgtgcgtgcttaattcgctttaagttgataatactcggccagcgtcatgcccaccgtgcgctgctgcagccagtcaaacagctgctccagatcgcggtacagcccttcgatatcctgctcggttttgaacgtcgggctgccgcccggcataaactcggaggagtgcagcatgaattcgacgtagtcatgcccctgcgccagcgatgtctcagccacgcttatcatcttggccacattgccgccactcggccgcagccagttgacggacggcgaacgccgcttgccgcgcagccggtcatagccctgcttgaaggcattcatcagcgccgagtgcttgtactggatactcatcggcacttccagcaacgacgaagcgcccggtttggcgatgttctgcggatcgatgaaataggcctgcgacgggaaccgactataatctgtgccgccgttgccctgtggattgcccggcgaaaactgccagttgacccgcggcgtcaccgaacagtccacctgatagccgtattccagcagcagcgaggcataatattcgttgaacgcccaacggccggcgcgatgactgagcattttggtctggaaggcatcttccagcagcttggtcatgtgatcgaccttggcgcggatctgatcggcgggatactcgatcaaataaggcttgtggcgccagtcgtcgtcggtgagcggcgtcagcggcgggctgttccaggcatgcaggtgcatgcccacttcacccgtgccgcgagcgatcacgtcgcgcgcgaactcgacataagccgggtccaccgccatttcatagttggtgagataaaccggtttgaaggcgtatttttcgcacaatgcctgaaagcgcggcaagaaacgcgtgttttcggtcgcgatgcgatcgtggttttgccacagattatcgccttcggtatcaatggtgatgagaaacgccggtttagtcatgaatatcgagcctgatatcaacagaatgcactatgttacgcaggccgtttcgccagggcaaacgactttgctgcctggtttggacaacgttgaagcgtattcgtccccggctcggcgatttttttacggccaggcaagaaaaccttgcaacagtagccacatgcgatcgtgtcatttagaatcaaagattggtttcccagaaagcgactcatgatgaacgacgcgccagccccaacttccgccccatccgtacagcgtattctgatcataaaactgcgccatcacggcgatatgctgctggtcacgccggtcatcagcagcctgcggcaaaactacccgcaggcgcagatcgatgtgctgctgtatcaggaaacgcaggagatgctggccagtaatccggaactatcgacgctgttcgccatcgaccgtcaatggaaaaaacagggcgcccgcgcgcacctggggcacgaactggcgctgctgcgtcgcctgaaggcgcaacgctacgatctggtggtcaacctggccgatcagtggcgcagcgccatcctcacgcgcctgaccggtgcgcgtatccgtctgggcttcgatttccccaaacgccgcggcttgctgtggcgccattgccacacccagctggtgccggtcgacaatcacgcccacctgcataccgtcgaacagaatctttcgctgctggcgccgctgaacctgcccgcgctcaatgaacatgtgaccatgagttacgatccgcaggattggcaggcttgtgagcaacggttgcagaagcagggcgtcttcggcagttatattgtggtgcaacccacctcgcgctggttcttcaaatgctggagcgaagagaaaatggccgccaccctcaccgccttgcaggccgacggccaccagctggtgatcacctccggccccgacgccagagaacaagccatggtagaacgcattttggcgctctgcccgccacagggcgtgatctcgttggccggccagctgacgctgcgccaactggccgccctgatcgaccacgccaagctgtttatcggggtggattcggtgccgatgcacatggccgccgcgctgcaaacgccgtgcgtggcgctgttcggcccttccaagctgactttctggcggccgtggcaagctaccggcgccgtgatctgggccggcgacttcggcgaactgcccgatccggacgccatcgataccggcaccgacgaacggtatctcgaccttattcctacagacgcggtgattgcagccgcgcggagcacgctggcatgaaagcatttcgtttggcgatcgttcgccaaaaatatcgcccggacggcggagccgaacgtttcgtttcccgcgccctggaagcgctggagcaacaggatctcgatctgaacgtcatcactcgcgaatggcagggcgacgccaatcccaactggcatatccacctgtgtaacccgttaaagctcggccgcatcagccgcgagcgaggcttcgccgtggcagccagggcgctgtggcagaaagagcgcttcgatctggtgcaaagccacgagcgcattcccggctgcgacatctatcgcgccggcgacggcgtacaccgccgctggctgctgcaacgcgcgcgtctgctgccggaatggcgccgcaagtggctgttctccaatcgctatcaccgctatgtgatgtgcgccgaacgcgccatgtacgccgcgcccgagctgaaagccgtcatctgcaacgccgagatgatcaagcaggaaatcatcgccgactttggcgtgcccgccgacaagatcacggtgatctataacgccatcgacaatcaaaagttcccgcccgccgacgaggccctgcgtcaacgtctgcgcgagcaatatcagatcccgcaacaggcgcactgcctgatcttcgtcggctccggtttcgagcgcaaagggctggccgccgccatccgcgccgtggcggcgaccgacagccacctcctggtgatcggtaaagacaaagccgaaaaacgctaccgggcgctggcgcagtcgctgggctgcggcgatcgcattcactttatgggcgtgcagaagcagaccctgccgttctatcaggccgcggacgcgctgctgctgccgacgctgtacgatccgttcccgaatgtgattctagaagcgatgtcgtgcggcctgccggttatcaccagcaccacctgcggcggcgccgagtttatcaccccaggccagaacggcttcgtgaccgacgcgctcgacgtaccagccatcacggaggctattcgggcactgccgcgccaggcgctgggatcatccatgggcgaagcggcaagattgcgcattatgacggctacgccggcgcatctgtccgaacagctgatttccctctataaccggttactggattagctatgcgtattctgatgatcatcgatggcctgccgggaggcggcgcggaaaaagtggtgctgaccctgtgtcagggcatgcagcaacaggggcacgacgtcagtctgatctcgctgcgcgacgtctgcaattaccctattccaccgggcattgattatcaggtggtggccgatcgcagccgtgccccctggcgcaagctgaccgagctgtcgcgccgcgccgccgcgctggatcgcgcgatagccgaacacgagcgccaacacggcgcgttcgatctggtgttctccaacctgcataaaaccgatcgcatcgtcagccgcagcaagcggttggccgcggatcgcctgtggttctgcattcacggcattctctccacgtcctacctcggccaccgcaagggtctggaccgctggctgaagcaacgcaaaatcgccaacgtttaccagggaagaaatatcgtcgccgtttcacaggcggtcggcgacgatctgcagcagaatttgccgatccgcccgcgccggttggcggtcatcaacaacccgttcgacatcgacgccattcagcaacaggcggcggcgccttgcgaactggccggccaggactatctggtgcacgtcggtcgctttcacaccaccaagcggcatgaccgcctgctgaaagcctatgcgctctccggcattcaggcaccgctggccttgatcgggtccggtgacgacgccaaagtcgacgaggtcaaacgtctggcgacaaacttgggcatcgcagagcgcgtgttgttcctcggtttccagagcaatccctatccgtttatccgccatgcctcgctgctggtgctcagctccgacagcgaagggtttggcaacgtactggtagaatcgctgctgtgcggcacaccggtggtcagcactcgctgcccgggcggccctgcggaaattctggaaaaagccggcatggctaacgcgctggcggaattaaacgaagcgtcgctggcagaaaaaatggcggaggtttacgccaacccgccgcagataaatcaacagcaattgctgagctatgggcttgagcctatttgccatcaatatattgagctgaaagaagaacaataaaaaaataaataaggcaggggatgcctgccttattttcttcgttagttgagcgcctgcattttctgccaaacctcatcgacagaaacatcttcacagtgccccgattcactttgcaaaatatgatggcggccagtccatggatgccaggacactttatcggtatcgccaaagaacaccaccatgtccttattcaacgcagcagcaagatgcatctgcccaccgtcgctgcacagcacccggtcgcataaatcaaacccgcccaacagctcacgcaccgacgccgtcggataaagcgcgacgcgttcgttttgacacagcgccagcagctgttcggcgcgcagctgatcgccgatgtcgtccggtgccaacgtgccctgaggcgaccaaaagatcagcacgccggtgtggggatcggcaaccagacggttgatgatttcggcatagcgctcaaccggccaacgccgtttcgggctgcggctgctgatgtgcacggcgcatacgcgctcgaccggcggcagacgttcctgccgccgctgtgccgccaattgccgctcttcaggcgccagaaacacccgcaccggcgggatcggaatggattgatcggttatcgccgataaatagctgtaggtgtgttcgacctgatggaggccgcggaaatcgtccttgcggaacgggcgatgaatatctttcgtgcccagatcggcgccgatgatatgggtggcgccggccattttcgctagacgcaggctgtatttgcaaggcaccgggttggccagaataaccgcatcgaactttattttgcgcagcttcaggaagatcatcatgcgttcgaaataaacgcccaacgtggtctcatttttcgccttgtgcttggcctttttatagacaaagactttctcgagatgaggattgtttttaacaacatcctggctgactttattgatcagcagataaacttttgcgtccggataggcaattttcaccccctcaatcaagggcgtggtgcaaacaagatcgccgatgttatcgcggcgaataattaaaatattcttcattccgagcctgtcggcgaaatcgctcgccggttgtctgaaactgacacccaaggttaccaaattagcgcctttcccttccagttatggtactattccgaataacccatataaatgaaattgatagaatgttgctgcgtttatatcaggtactactctacctcatccaacccctgatctggctccgcttactgctgcgcagccgcaaagctccagcctaccgtaaacgctgggcggaacgctatggcttctgcgccgggaaagtcgtgccaggcggcatcatgctgcattccgtctccgtcggcgaaacgctggcggccatcccgctggtgcgggcgctgcgccatcgttaccccgctttgccgataactgtgaccacaatgaccccgacaggttcagaacgcgtccagtccgctttcggcaaagacgtgcatcatgtctatctgccctacgatctgcccggcgccatgaaccgcttcctcgaccaggtgaatcccaagctggtgatcatcatggaaaccgagctatggcctaacctgatcaacgcgctgcatcagcggcaaatccccctggtgatcgccaatgcacgcctgtcggcccgctccgccgccggctataagaaaattggcggattcatgcgcgatatgctgcgccgcatcacgctgatcgccgcacagaaccaggaagatggcgatcggtttatcgaactgggcctgaaacgctctcagctggccgtcaccggcagcctgaaattcgatatctccgtcaccccggagctggccgcccgcgccgttacattgcgccgccaatgggcgccgcgccgcccggtgtggatcgccaccagcacccacgacggtgaagagaccatcctgctggaagcgcaccgcaaactgctggaaaaacaccctgacctgctgctgatcctggtaccgcgtcacccggaacgcttcccgaccgccaaagagctggtgcagaaggccggcttcagttacaccctgcgcagcagtggcgaaatcccgtccggcagcacccaggtggtgatcggcgataccatgggcgaactgatgctgctgtacggcatcgccgatctggcctttgtcggcggcagcctggtggaacgcggcgggcacaacccgctggaagccgccgcgcacgccatcccggtgttgatgggcccgcatactttcaactttaaagacatctgcgccaagctttcgcaggccgaaggcctgatcaccgtgaccgacgtggattcgctggtgaaggaagtggcaaccctgctgaccgacgaagactaccgccgttactacggccgtcatgcggtggaagtgctgtatcagaatcagggagcgttgcagcgcctgctgcagctgctggaaccgcacctgccgccccggagtcactgaatgagcagccgcaaaagcctgtcggtggtgatgatcgccaaaaacgaagccgggctgttgccggactgtctgcgctcggtcgagtgggccgatgaaatcatcgtgctggactccggcagcgaagacgacagcgtcgccgtcgccgaaagcctgggcgccaaagtcttcacccacaccgactggcaagggtttggcaagcagcgtcagctggcgcaaagctacgccagccatgactacgttttgatgatcgacgccgacgaacgcgtcacgcccgagctgcggcaatctatcgaacaggtgttgaacgcgccggacgacggcgccgtctacagctgcgcgcgccgcaacctgttccttggccgcttcatgcgccacagcggctggtatcccgaccgcgtcaaccgcctgtacgccaaccaacgctatcgctataacgacgatctggtgcacgaatcgctgaacatcggcggcgccaaagtcatccctctcagcggcgatatgctgcacctgacctgccgcgatttcttcgccttccagcgtaaacagctgcgctatgccgaagagtgggccacccagcgccaccgggccggcaagcgctgcggctacctgtccatcctgacccacacgctcggcgccttcgtcaaaacctggctgctgcgcgccggcttcctggacggtaaacaggggttgctgttagcggtggtcaacgcgcaatataccttcaataaatatgccgcattatgggcattgggccgcaactactcagagaagtgaatcatgaccagcaaagccatctatcccgggaccttcgatcccatgaccaacggccacctggatttagtgacgcgcgcatcactgatgttcgatcacgtgattctggccatcgccgccagcccgagcaaaaaaccgctgttcagcctggatgagcgcgtggcgttggcgacgcaggtcacctcgcatctggacaatgtggaagtgctgggcttcagtgagctgatggcgcacttcgccgcccaccagaacgccaatatcctggtgcgcgggctgcgtgcggtgtctgactttgaatacgaattgcagctggcgaacatgaaccgtcacttgatgccaacgctggaaagcgtatttctgatgccttccgaagagtggtcgttcatctcctcctcactggtgaaggaggtcgcccgccacggcggcgatatcgcgcctttcctgcccgatgtggtcacccaggcgctgatggcgaaactcgccgccgagtgatgctcagcgctggcagcggcggcaaaagaaggtgctgcgctgcccgtgcttggcggattcaatcggcgtgccgcatgcgcggcacggttctcccgcccgcccgtaaacctgcagctcctgcgcgaaataccccggtttgccgtccgactgcaaaaagtcgcgcaatgtcgtgccgccctgctcgatagagcgctgcaacaccgccttgatggtcttcgtcagcagttccgcttcggctttgctcaaggatcccgccggacgatcgggcaggatcccggcgctgaacagcgattcgctggcgtaaatgttaccaacgccgaccaccaacttgttatccatcagccacggtttgatcagcgtgcgcttattgcgtgatttttcatacaggtagtcgccgttgaacgcttcgctcagcggttccggccccagatgcgccaacacgctgctggtcgccaggtcttcgcaccacagccaggcgccgaaacggcgcggatcggtatagcgcaggatcatgccgttgctgatcaccagatcgacgtggtcgtgtttgccggcttcgtcttcgttttcctcgcgcagcatgcgcaggctgcccgacatgcccaggtgcacgataatccaaccgttctccagctcgatcagcaggtatttggcccggcgctgcacgctgagcaccggccgatcgctcagcgtcaggatctgctcggaaaccggccagcgcaggcgcgcattgcgcaccaccgcatactgaatgctgtggccgacaagataaggctctataccgcgtctgctcgtctcaacttccggtaattcaggcatctggcttcccctccgacgttttctaccctttataaaacaaaaaacccggccaaggccgggtttttcattaatccactaaaattatttaattttagcttctttgtatactacgtgctgacggacaactggatcgaatttcttcagttccaatttttccggcttagtacgcttgttcttcgtggtggtatagaagtgaccagtaccagcagaagaaaccagcttgatcttctcgcgaacacctttagccatgattcagttccttaatacttctcaccacgggcacgcagatcggccagaaccgtctcaatacccttcttatcgataacacgcatacctttagcagatacacgcagagttacaaagcgcttctcagcctcaacccaaaaacggtgtgagtgcaggttaggcagaaaacggcgtttggtcgcgttcattgcgtgggaacggttgttaccgctcaccgggcgcttgccagtaacttggcagactcgggacatgtctattctccaaaaatcaaatcagctcgagcttcgtatagggtatggccgcctcgtcaggcttttagagcccatctcagcaaacttcatactgaggagactctcgtcatcaggtagaaaccacacatcaggtcagaaacctgctgagataggctcttgcgccaaacccaagattctcaaaggtggcgtagtatacgctctgaagcgtaagtgctcaagtcccgaacagctaaagatcccacaaggatcgcgaaaaaatcgcttaaagccatccgcgctcggcaaaagagacgcattcaccccgaccgatcaccaaatgatcaagcactcggatctccaataactgacaggctttcaccacctgttccgttattaaacggtcggcatgactgggttcagccttacccgaagggtgattatgcgcgagaatcagcgcggcggcattagccttcaacgcttcgcgcacaatttctctcgggtagacgacgacgctgctgatggtaccagcaaacatctcctgatggcgaataacccgatgctgattgtctaaaaacaataccaaaaagacctctcgctcgcgatgcgccagcaggctttgcagataatgctgggtaacgcgcgggttgagcatggcattttcctgcgacaagtggctggaaaagaagcgcagcgccagctcggcaatcgcctgcagttgggtatagctggcgtcgcccaggcctttttggctgcaaaaagcctgatgatcggccgacatcaggtgataaagcgagccgaatcggcgcagcagttgctccgccagctgcatcacgtgcacgccgggcaatccggtgcgcaagaaaatggccaacagctctgcgtcggacaacgacgccgccccttgcatcaacagcttttcacgcggcgccaacgcgcccggccagcacgccacaatcgggttgctcatcgtgttcctccctgaaagggctacagcatgccatgcgccacccgacgcgttcgacaggtgtttgataacattgcgaagtgtttcgcaaagcacaatgtaacgccctgcagccattgcggaatcgctcacctgaacggcggatatgctaaaatggcgcatctttcggctttcaatcggacaatgatgatgacgggactttccggcaaacatattgtgcttggcatcagcggcggcatcgccgcctacaaatgcccagagctggtgcgccgcctgcgcgacaggggcgcggaagtgcgcgtggtgatgacccacgccaccaaggcgttcattacgccgctgacgctgcaggccgtttccggctatccggtgtccgacgatctgttggatcccgccgccgaagccgccatgggccacatcgagctcggcaaatgggcggatctggtgattctggcgccggcgaccgccgatctgctggcgcgcgtcgccgccggcatggccaacgatctgctgaccaccgtctgcctggcgaccgacgcccctatcgccgccgcgcccgccatgaaccagcagatgtatcgcgccgccgccacgcaggccaacctgcaaacgctgcaggcgcgcggcatgctgctctgggggcctgacagcggcagccaggcctgcggcgacgtcggcccgggccgcatgctggatccgctggacatcgtcgagctggcgaacggccatttctctgtcacgcaggatctgcaacatttgcaggttatgatcaccgccggcccgacgcgtgaagcgctggatccggtacgtttcatcagcaatcacagctccggcaaaatgggcttcgccattgcccgcgcagccgccgctcgcggcgcgcaggtgacgctgatcgccgggccggtcaatttgccgacgccgccatcagtcacccgagtcgacgttaccagcgcactggagatggagcaggcggtgcaacaacgcgccgcgcagcagcagattttcatctcctgcgccgccgtggccgactatcgccccgagcggatcgccgatgaaaaaataaaaaaacagggtgatgaaatcgtcctcaagatggtaaaaaaccccgatatcgtcgccggcgtggcggcgatgaccaaaaatcgaccgtttgtcgtggggtttgccgccgaaacccagaatgtggaagaatacgcgcggcaaaaactggcgcgtaagaagctggatttgatttgcgctaacgatgtatcgcttgcagagcacgggttcaacagcgacaccaatgccctgcaccttttttggcaggatggagaaaagcgcctggcgctgagcgacaaggcactccttggccaacgtttaatagacgagatagtcagccgttatgatgaaaaaaatcgacgttaagatcctcgacccacgcatcggtcaggatttcccgctaccgacctacgctacgccgggctctgccggtctcgacctgcgcgcctgtctggacagcgcggtagagctggcgccgggtgaaaccacgctgctgcctaccggcctcgcgatccacatcgccgacgccagcctggcggcggtgatcctgccgcgctcaggcctgggccataagcacggcgtcgtgctgggcaatctggtcggcctgatcgactccgattaccagggccagctgatggtgtccgtgtggaaccgcggccagaagcacttcaccatcgagccgggcgaacgtatcgcgcagatggtcttcgtgccggtggtgcaggccgaattcaacctggtggaagagttcgacagcagcgaacgcggcgaaggcggcttcggccactcggggcgccactaagcgccacccaatgcacgatgaccggcagggaaacgtcgcctgaaccttgcctttccggggagaaggatgtctctgcggcaaggttttaccgcgacaattgcagcgcacaccaggcagcgcggaaaaaggccgttaaggccgctgaccccagcatcgtaaaaaagctatcacataagccgcacagagcctgctctgcagcggccggtgcgcgggtttccgtcagttaagttttagcaagggtctaatcagacatggcagaaaaagaaaagacgaaaaggaatcggcgcgaggaaatattgcaggcgttagcccagatgctggaatccagcgacggcagccaacgcatcaccaccgccaagctcgccgcgaacgtgggtgtttctgaagctgcgctgtaccggcatttccccagcaagacacggatgttcgacagtctgatcgagtttatcgaagacagcctgatcacccgcatcaacctgatcttgcaggacgagaaagagacgtttaatcgtctgcgcctgattttgctgctgattctgggctttgcggagcgcaacccagggctgacgcgcatcatgaccggccacgcgctgatgtttgaacaggatcgcctgcagggccgcatcaaccagctgttcgagcgcatcgaggcgcagctgcgtcaggtgctgaaagagcgcaaattgcgcgaaggcaaaggctttatcgtcgatgaaacgctgctggccagccaactgctggccttctgcgaaggcatgttgtcgcgctatgtgcgttcggaattccgctatcgccccacgcaggaattcgacgcccgctggccgctattagcggcacagctgcaataacgaaaacgccgggcatgcccggcgttgttatttataccccgtactgctcgcggtaagcgcgcaccgccgccaggtggtccgccatctccggtttctcttccaggtaggcaatcaggtctttcagcgtcacgatcgaaatcaccttgcagtgatagtcgcgttccacttcctgaatggcggagatatccgcgcggccgcgttcctgacggtcgagggagatcagcacacccgccagcgaagcgccgctggcgccgatgatttccatcgactcgcggatcgcggtgccggcggtgatcacatcgtccaccagcatcacgcgcccctgcagcgggctgcccaccagcgaaccgccttcgccatgggttttggcttccttgcggttaaagcagtaaggcacgtcgcgctcatggtgttccgccagcgccaccgccgtggtggtggcgataggaatgcctttataggccgggccaaacagcagatcgaaatcgatgccggaatccatcagggcttcggcgtagaagcgccccaacagcgcaagatcgcgcccggtattaaacaggccggcgttgaagaaatacgggctggtgcggccggatttcagggtgaactcgccgaacttcaatacctgcttgttaagcgcgaactcgataaactggcgctgataggctttcattactgcttctcctcgtctgaatctgcttgggtcttgtcattactaccgcccgatcgccgggcataaaaaaggcgacttctcagtcgccttgaaaaatcagtccaccagcgccgctttctgcgcctggaagatggtttcgatgccccctcgggccagcgccaatagcgccaacagctcatcgtggctgaacggctcgccttcggcggtgccctgcacttcaatcatgcggccgtcttccatcatcaccacgttcatatcggtttccgcggcggaatcttccacatactccagatcgcacagcgcttcgccattgacgatgccgacggaaaccgccgccaccatccccttcatcgggttggctttcagcttgccgttagccaccagggtgttcagcgcatcggccagcgccacgcaggcgccggagatggaggcagtgcgggtaccgccgtcggcctgcagtacgtcgcagtcgagggtgatggtgaattcaccgagctttttcagatccaccgcggcacgcagcgagcgggcgatcagacgctggatctccagcgtgcggccgccctgcttgcctttggcggcttcacgggcgttgcggctgtgggtggagcgcggcagcataccgtactcggcggtgatccaaccttgcccctggcctttcaggaagcgcggaacgccctcttctaccgtggcggtgcacaagactttggtatcgccaaactcaaccagcactgaaccttcagcgtgtttggtatagtgacgagtcagtgtcagggggcgaacttgctgtggtgctctgcctgcaggacgcatgggctctctccggcttcaaatcaactattggctgcgcattatacgggcttcgtgacgtaatgcctatcctgcccgcagccgcgacgctataatcgccccatcttttcctattacgggtacgcatcaatgatccgcagcatgaccgcctacgcccggcgtgaaatcaagggtgaatggggcagcgcagcctgggagctgcgttccgttaaccagcgctacttagaaacctacatccgcctgccggaacaattccgcagcctggagccggtgatccgtgaacgtatccgtggccgcctgacccgcggcaaagtcgaatgcaacctgcgtttcgaactggatccaagcgcgcaaagctcgctgatcctgaacgaaaaactggccaaacagctggtcgaagccgccaactgggtgaaaatgcagagcgacgaaggggaaatcaacccgatcgacgtgctgcgctggccgggcgtaatgtccgcgcaggagcaggatctggacgccatcagcgccgagctgatgcaggcgctggacggcgcgctggatgactttatcgtcgcacgcgaaagcgaaggcgccgcgctgaaaacgctgatcgaacagcgcctcgacggcgtcagcgccgaagtggtcaaagtgcgcgcccagatgccgaacatcctgcaatggcagcgcgagcgcctggtcagcaagctggaagaggcgcaggtgcagctggaaaacacccgcctggagcaggagctggtgctgatggcgcagcgcatcgacgtcgccgaagagctggaccgcctggaagcgcacgtgaaagagacgcacaacatcctgaagaagaaagaagccgtcggccgccgcctcgactttatgatgcaggagttcaaccgcgaatcgaacaccctggcctccaagtcgatcaatgccgacgtcaccgcctccgccatcgagctgaaggtgttgatcgaacagatgcgcgagcagatccagaacattgagtgatcccgctccgcacgccatcaagcccgcgccacgcgggcttttttatggttgcagatcagcgataggcggccgcctgctcctcaccgatcaaccccattttctgcagctgcaccgcaatgctccaggttgagcgctcgaactcatcgctcagcgcctccagcgtcgccccggccgcatggctctcgcgcagccgcagtttttcttcttccggccaggggaagtaagcattggccggccggccctcggccagattcttctgctgcttttcttccggcgtcagcctggcttttttctgcagttcggattcaccgtcgaactcgttggccaatgcaaacagcaggcggatagcctccggcgcgcaggccgctgaagccggtctcaacagctcgccggtgtcgggattaacgccgttggccagcgccctgagcaacgtgccggtattcatcgttcgcctccttgttcgataaaatgcgtgccgatcgcgaccggcgccttgtccaaacatgtttctcttcctcagccaagaaagccacgctttgcgccatgaaaaatcgcccattgcgagccagattccaggcgcctgaacgtgcgggacggtggttgcatcaggctgcgagccggcaggcatcatggaagacggctcactaaggcacttcgggggcttatgaaaaactgccgagcagcgcgtgtggatgacatttggcaagatatcccgcacgccataagtattttgttctaattatcacgcaaggtaatgaaaggacggcgatgctgtggctaaatgtgtttttttcctgcccgtgaaccgtacggaccgtttatgccacaaattctgcaatttattatggccttggtggtgatcatcgccctggcgctgctggtcagcaataatcgcaagaaaatccgcctgcgctatatcatccagctgttggtgatcgaaggcgcgctggcctacttcttcctgcactccgccagcgggctcagcgtgatcaaacacgtcgccggcttcttcgacaccctgctcgcctacgccgcccaaggatcggagttcgtattcggcggcatgagtaaggatggcctggcgtttatcttcctcggcgttttgtgccctatcatctttatttccgccctgatcggcattttgcagcatttccgcatcctgccgctgatcatccgcctggtgggcaccctgctgtccaaggtcaacggcatgggcaaactggaatcgttcaacgccgtcagcacgctggtgctggggcagtcagagaacttcatcgcctacaagggcatcatcggcgacatctcgccgcgccgcatgtacaccatggccgcgaccgccatgtcgacggtatcgctctccatcgtcggcgcctacatgtcgatgatcgacgcgcagtacgtggtggcggccttgatccttaatatgttcagcaccttcatcatcctgtcgatcatcaacccgtatcaggttgaagacgagccggagctgaagctgaacaagctgcacgaagatcagagcttcttcgaaatgttgggcgagtacattctggccggcttcaagattgcgatgatcatcgcggcgatgctgattggctttatcgcgctgatctccgccgtcaacgcgttgttctcggcggtgctcggcatcagcttccagcagatcctcggctacgtgttctatccgctggcctggctgatcggcatcccggcggaggaggccctgaaggcgggcagcatcatggcgaccaaactggtggccaacgaattcgtggcgatgattgaactgaagaagatcgcggcggagctgtcgccgcgcgggctgggcattttgtcggtgttcctggtgtcgttcgccaacttcgcctccatcggcatcgtcgccggcgccatcaaaggactgaacgagcagcaaggcaacgtggtttcccgttttggcctgaagctggtttacggctcgacgctggtgagcctgttgtcggcagccatcgccggcctggtgctgtaatcctcactcccggccaggcggccgggagtgcgttttaaaacgccacgcacaccggcgcatccacccgcatcaccgaatcctgcgcaaactgctgcttatagccgctgcgcagcgcctcgatattcgcctcgctctctttgcccggcgcatggatcagcagcagcgccttgctgttctcgcgcgccagtttgccgtcgtggcccagccactgccctttggcatcaaacaccgtcagcccgtctttaaaacgtggtgtcacctggctatcgacgaaggtttgccactcggcggcggtgatcgccggccccgccggccggttcaggccgaagtagagcgttgtctgcactagcggatcgccggtgcggcaagccggggtgggggaaacagcctggtggcctggcgccacgcagccgctcagcagcagggctgccatcatggcgccagcagccagtctcggggagtttttcatctgcagtctcggtttctcggttgaaggattcgctgcaaaaatcatagtcagcgatggaaattagcgcgaaatttctaatgctttcattaacagccagatgttaaaaaaggctggttatcggcaataaaaacggagtttggattagctatattaatccgaaatgccatcggtgaaaaaaactcagtggcgcgcgtcctcggcggcgattaccctgccggccatcattctgacgcaagtacgctgtgaatcccttatgttactgagcatcctttatatcatcggcatcaccgccgaagccatgaccggcgcgttggcggccggccgccgccaaatggacatgttcggcgtgatcatcatcgcctcggtcaccgcgatcggcggcgggtcggtgcgcgatatgttgctcgggcattttccattgggctgggtcaaacacccggaatacatcgtcatcgtcgcaatagcggcgatcgtcaccacctgggtggctcctctgatgcgccatctgcgccgcctgttcctggtgctcgacgccgtcggcctgatcgtcttctcgatcatcggcgcccaggtggcgctggatatggggcacagcgcgattatcgccgccatcgccgcggtgatcaccggcgtcttcggcggggtgctgcgcgacatgttctgcaaccgcatcccgctggtgttccagaaagagatctacgccggcatctccttcagcgccgcctggctgtatatcggcctgcagcacctcagcctgccgcacaatctggtggtgatcctcaccttggtcgccggcctgagcgcgcgtcttatcgccctgcgcttccgcctcggcctgccggtgttcaactaccagcatccggatcactgatcccggggcggcaacgcgccgccgccgaggccaaaactgcaaaaatgtcgcccttcgacgcgcaaattcgccctttcgacgctttttccacgcaaagccgcgggcaaaatgcgagctaacgctgcacccggcgcgttagccgtgtatactgtgcggagaaaatacacatccgctgtttttggcatatcaaccgttatcaacgaacatcatcatggctcaaggcacgctttatattgtctctgctcccagtggcgcaggtaaatcaagtctgattcaggctttgttaaagacgcaaccgctgtacgacacgcaggtttcggtttcgcacaccacgcgcgacagccgcccgggtgaaaatcacggcgagcactatttcttcgtctcgaaagacgaattccgccggatgatcgagcaggatgcgtttcttgagcacgccgaagtgttcggcaactattacggcacctcacgcgccgccatcgaacaagtgttggcgaccggcgtagacgtgtttctggatatcgactggcagggcgcgcagcaaatccgcgccaaaatgccgcaggcgcgcagcatcttcattctgccgccgtcgaaggaagaactgggccgccgcctgcgcgggcgcgggcaggactccgaagaggtgatcgccaaacgcatggcccaggccgtggcggaaatgacgcattacgcggagtacgattacctgatcgtgaacgatgatttcgatctggcgctgtccgatctgaagaccatcattcgcgccgaacgcctgcgtttgggccgccagttgctgcggcatgacgctttaatcagcaaactattggcagactgaaggcagtttcagtatcatgcccagtcttttcgtcacctgtggagtagcacaaatatggcacgcgtaactgttcaagacgctgtagagaaaattggtaaccgttttgacctggtgttggtcgctgctcgtcgggcgcgtcagatccagaccggcggcaaagatgcactggttccggaagagaacgacaagtacaccgttatcgccctgcgcgaaatcgaagaaggcctgatcaccagccagatcctcgacgtgcgtgagcgccaggaacagcaagagcaggaagccgcagagattcaagcggttaccgcgattgctgaaggtcgtcgttaattagacagcgagtccgccttgtacctgtttgaaagcctgaatctgctgattcaacgttacctgcccgaggagcagattaagcgcctcaaacaggcatacctcgtcgcgcgcgacgcgcacgagggccagacacgctccagcggtgagccctacattactcacccggtcgccgtggcctgcatcctggcggaaatgcgtctcgaccacgagacgctgatggcggcgttgctgcacgacgtcatcgaagacaccccggccacctatcaagatatggaacagctgttcggcaagagcgtcgccgaactggtcgagggcgtctccaagctcgacaagctgaagttccaggacaagaaagaagcgcaggcggaaaacttccgtaagatgatcatggcgatggtgcaggatatccgcgtcgtgctgatcaagctggccgaccgtacgcacaacatgcgcaccctcggttcgctgcgccccgacaaacgccggcgcatcgcgcgtgaaaccctggaaatctatagccccctcgcccaccgtctgggtattcatcacctgaaaaccgagctggaagagctgggcttcgaggcgctgtacccaaaccgctaccgcgtgatcaaggaagtggtgaaagccgcgcgcggcaaccgcaaagagatgattcaaaaaatcctctccgagatcgaagggcggctgaccgaggccggcatcgcctgccgcgtcagcggaagggaaaaacacctttactccatctacctcaagatgcacctgaaagaacagcgtttccattccatcatggatatctacgcgttccgggtgatcgtcaaagaggtcgatacctgctaccgcgtgctcggccaggtgcacagcctgtataaaccgcgtccggggcgggtgaaagattacatcgccattcccaaggccaacggctatcaatcgctgcatacctcgctgatcggcccgcacggcgtgccggtcgaagtgcagatccgcaccgaagacatggatcagatggctgagatgggggtggccgcgcactgggcttacaaggaaagagaacagggcgaaaccggcaccacggcgcagatccgcgcccagcgctggatgcaaagcctgctggagctgcagcaaagcgccggcagctcgtttgaatttatcgagagcgtcaaatccgatctgttcccggatgagatttacgttttcaccccggaaggccgcatcgtcgagctgcccgccggcgccacgccggtcgacttcgcctatgcggtgcataccgatatcggccatgcctgcgtcggcgcgcgcgtcgatcgtcagccgtacccgctgtcgcagtcgctgaccagcggccagaccgtcgagatcatcaccgcgccgggcgcacggcccaacgccgcctggctgaacttcgtggtcagctcgaaagcgcgcgccaagattcgccagatgttgaagaacctcaagcgcgacgactccgtcggcctcggccgccgtctgctcaaccatgcgctgggcggcagccgcaaactggccgaaatcccgcaggaaaatattcagcacgagctggatcgcatgaagctggcgacgctggacgatctgctggcggaaatcggcctcggcaacgccatgagcgtagtagtggcgaagaacctgcagggcgatcagtccagcctgggcaccacctccggcgtgcgcaacctggccatcaagggcgccgacggcgtgttgatcaccttcgccaagtgctgccgtccgattccgggcgacccgattatcgctcacgtcagcccgggcaaagggctggtgatccaccatgaatcctgccgcaatattcgcggctatcagaaagagcctgagaagttcatggcggtcgagtgggataaagagaccgagcaggagttcatcgccgagatcaaggtggatatgtttaaccaccagggcgcgctggccaacctgacggcggcgatcaacgcggccgagtccaatattcagagcctgaacaccgaagagaaagacggtcgggtttatagcgcctttatccgcttgaccacccgcgatcgcatccatttggcaaacattatgcgtaaaatccgtatcatgccggatgtgatcaaagttaaccgcaaccgaaactagcgcttatgagtcctgaacgctatgcgcggatttgtgaaatgctcgcgacccggcagccggatttgacggtctgcctggagcaggtgcacaagccgcataacgtctccgccattatccgcaccgccgacgccgtcggcgtgcatcaggtccacgccgtgtggcccaccacccgcatgcgcaccctggtctcctccgccgccggcagcaacagttgggtcagcgttaaaacccatcgcaccattggcgacgcggtcggtcacctgaaagcgcagggcatgcaaattctggccaccaacctgtctgcgcgcgcggtcgatttccgcgaggtggactacacccggccaacctgcgtgctgctcggccaggaaaaaaccggcatcaccgaagaagcgctggcgctcgccgatcaagacatcgtcattccgatgatcggcatggtgcaatcgctcaacgtctccgtcgcttcggcgctgatcctgtatgaggcgcagcgccagcggcaaaacgccggcctgtaccgccgcgacaacagtatgctggacgaagaagagcagcagcgtctgctgttcgaaggcggctatccggtgctggccaacgtggccaagcgcaaagggctgccgcgcccgcagatcgatgaacagggccaggtggtcgccagcgccgaatggtgggcggccatgcaggcgacggtgcgcaaatgaaaggccgcctgctggatgctgtcccactcaccacgctttccggggttggcgccagccaggcgggcaaattggccaagcttggcctcgacaccattcaggatctgctgctacacctgccgctgcgctacgaagaccgcacccgcctctatccgatcaacgatctgctgccgggcatctacgccacggtagagggggaagtgctgcgcagcgacatcagtttcggccgccgccgcatgctaacctgccagatcagcgacggcaccggcatcctcaccatgcggttcttcaacttcaacgccgcgatgaaaaacagcctggccaccggccgccgcgtgaccgcctacggcgagatcaaacgcggcaaccacggcgcggagatcatccatccggaataccgcattcagggcgaagccagcgaagtcgagctgcaggagtcgctgacgccggtttaccccaccaccgagggggtgcggcaagccacgctgcgcaagctgaccgatcaggcgctggcgctgctggatacctgcgccatcgccgaactgctgccgccggagctgagcggcggcctgatgagcctgccgcaggcgctgcacaccctgcaccgcccgccgccggacatccagctggcggatctggagctgggcaaacacccggcgcaaaaacgcctgatcctcgaagagctgttggcgcataacctcagcatgctggcggtgcgcgccggcgcccagagttaccaggcgcagccgctgctgccggacgatcggttgaaaaaccgttttctcgcccagctgccgttctcgccgaccggcgcgcaaacgcgcgtggtggccgacatcgaagccgatatgcaaaaagacttcccgatgatgcggctggtgcagggcgacgtcggctccggcaaaacgctggtggcggcgctggcggcgctgcgcgccatcgcgcacggcaaacaggtggcgctgatggcgccgaccgagctgctggccgagcagcacgccaacaatttccgccagtggtttgaaccgctggggctggaggtcggctggctggccggcaaacagaaaggcaaggcgcgcatcgcgcagcaggaagccatcgccagcggccaggtgtcaatggtggtcggcacccacgccatcttccaggagcaggtacagttcaacggcctggcgctggtgatcatcgatgagcagcaccgcttcggggtacatcagcggctggcgctgtgggagaaaggcgaagagcaaggcttccacgcccatcagctgatcatgaccgccacgccgatcccgcgcacgctggcgatgaccgcctatgccgatctcgacacctcggtcatcgacgagctgccgccgggccgcacgccggtgaccaccgtcgccattcccgatacccgccgcgccgacatcattcaacgggtgaaaagcgcctgcctggaagaggggcggcaggcttactgggtgtgtacgctgatcgaggaatctgagctgctggaagcgcaggcggcagaagccacttgggaggaattgaaagccgcattgccggagctgaaggtggcgctggtgcacggccgcatgaaagcgcaggagaagcaggcggtgatgcaggcgtttaaacagggcgagctgcagctgctggtcgccaccacggtgatcgaagtcggcgtcgacgtaccgaacgccagcctgatgatcatcgaaaacccggaacggctgggcctggcgcagctgcaccagctgcgcggccgcgtagggcgcggcgcggtggcctcacactgtgtgctactgtacaaaacgccgctgagcaaaaccgcgcaaacgcgcctgcaggtgctgcgcgacagcaatgacggcttcgtcatcgcccagcgcgatctggagatccgcggcccgggcgagctgctcggcacccgccagaccggcagcgccgaattcaaagtggcggacctgctgcgcgaccaggcgatgatccccgaagtgcagcgcgtcgctcgccacctccaccagcactacccggaacacgcccaggcactgattgaacgctggctgccggagaaggcgcgctactccaacgcataaaaaagggcgccgacggcgccctcttctttttttctggctcgcgatatcaccccaccgccgggaacaccggcagcagcagatacagcttgatgacaatggcattggcgatatcgataaagaacgcccccaccatcggcaccaccaaaaacgccacgtgcgacgggccgaaacgatcggtgatcgcctgcatgttggcgatcgccgtcggcgtggcgcccatgccgaagccgcagtggccggcggccagcaccgccgcgtcgtagttcttgcccatcacccggtaggtgacgaatatcgcgtacagcgccatcaccagcgtctgcaccgccaggatcgccagcatcggcagcgccagcgaggctagctcccacaggcgcaggctcatcaacgccatcgccaggaacagcgacaggctgacgttacccaacaccgacaccgcccgctcaaacacggtatagaagccggtgaaggccagcgtgttgctgaggatcaccccgacgaacagcacgcaaacgaagttcggcagttcaaacaccgtgccgctcagcaggccggcaatcaattgccccaggctcagacagatggcgatcatggcgatggtttcgatcatcaccagcgaggtgatgagacggccgctttccggcttctcaaaaccgctcggctgcacgctgtcatccggggtgccttccggcgtggaggagtgcttgaccagatagcgcgccaccgggccgccgatcagaccgcccagcaccaggccgaaggtggcacaggccatggcgacttccgtcgcgttttcaaaaccgtagcgctcgatgaacagcttgctccaggccgccccggtgccgtggccacccgacagggtgatcgatccggcaatcaggcccatcagcggatccagccccagcattttcgccatgccgatgccgatggcgttctgcacgataagcagccccagcaccacgaacaggaacactaccagcaccttgccgccggcgcgcaaacgcgccaggttggcgttcaggccgatggtggcgaagaaggccagcatcagcggatccttcagcgacatgtcaaaactgacttcccagttgacgagctttttcagggctaacagcagaagggccaccagcaaaccgccggcgacgggagcgggaatggtatattttcgcagcaggggaatggttctgacgcacttgcctccgaggagcaaaaccagcgtcgccgcgactaacgtgccataagtatcaagatgaaacatccaggtactccatgtaagggaaaagatccaaataaaaataataagttatagaaaaccacttagtttttaaacttgatgagtgcaggattagaagtaaaaaacgctgagatgacaagaaaaaatgaatgaaaatgcgacataaacgggaaagtcggcaacataatatttacgcgcaaccgtttgcttttgcggggcggggcattaaaatgcctgctttgccgtatctggaaacgccacaccatgagcatgtcatcctccgagcttgatgccgcgcgccaagccgcctcagaaccccgcgccagtgaactgatttatcgcctggaagatcgcccgccgctgccgcaaacgctgtttgccgccggccagcatctgctggcgatgttcgtcgcggtgatcacaccggctctgctgatctgccaggcgctgggcctgccggcacaggatacccagcacatcatcagcatgtcgctgttcgcctccggtctggcttccattctgcaaatcaaaacctgggggccggtgggttccgggctgttgtcgattcagggcaccagcttcaatttcgtttcgccgctgatcatgggcggtctggcgctgaaaaacggcggcgccgacgtgccgaccatgatggccgcgctgttcggcaccctgatggtcgcttcctgcaccgaaattttactgtcgcgcgtgctgcatctggcgcgccgcattatcaccccgctggtttccggcatcgtggtgatgatcattggcctgtcgctgattcaggtcggtctgacctcgatcggcggcggctacgccgcgatgaacgatcacagcttcggctcaccgaaaaacctgctgctggccggcgcggtgctggcggtcatcatcctgctgaaccgccagcgcaacccttacctgcgcgtcgcttcgctggtgatcgccatggcggtcggctatctgttggcctgggcgatggacatgctgcccgcaggcgcatcggcagccccaacggcggcgatcaccattcccacgccgctctattacggcctgggcttcgactggaacctgctgctgccgctgatgctgatctttatggtcacctcgctggaaaccatcggcgacatcaccgccacctctgacgtctccgaacagccggtcagcgggccgctgtacatgaagcgcctgaagggcggcgtgctggccaacggcctgaactcgatgctgtcggcggtgttcaacaccttccccaactcctgcttcggccagaacaacggcgtgatccagctgaccggcgtcgccagccgttacgtcggcttagtggtggcgctgatgctgatcgcgctggggctgttcccggcggtggccggcttcgtgcagcacattcccgagccggtactgggcggcgcgaccatcgtgatgttcggcaccatcgccgcctccggcgtgcgcatcgtgtcgcgcgagcgcctgaaccggcgcgccatcatgatcatggcgctgtcgctggccgtcggcatgggcgtctcccagcagccgctgatcctgcagttcgcgccggactggctgaaaaccctgctctcttccggcatcgccgcaggcggcattaccgccatcgtgctgaacctggtgttcccgcaggaacacgagaaaaagtaacccgcccattgacgttcaaacggccgcttgcggccgttttttattgtctatcagaccattgcccttgagatgcccggccaattgcggcataaacagggtatcttttttgaccgatgcggatgtagacgatgaaatttatcggaaagctgttgctgacgttgctgctgctgaccgtgctggcggcggtggtgctgtatctggtggggcaaacccgctgggcggcaggccgcctgagcgcctggatcagcgacaacagcgaataccgcctgtcgataggaaaaatcacccactcgtggaatcagccgggccagatcggtctggaagaggtgcagctggcgcgcaatggccagccgcaggcgctggccgccaaacgcgtcgatctcggcctcagcctgcgccaaatcaccgaaccgcgctatttccacagcgtcacgctgcgtgacggcacgctgaacgtgcagccgcagactgctgcgctgcctgtacaggccgacgtgctgcagctgagcaacatggcgctgcaatccaacgataacgagtggcagctcaacgcgcagcgggtcaatgccggcatcacgccgtggcgcccgctggccggccatctgctgggggacaacaatcagttccagttcagcgccggttcgatgacgctgaacggcattcccgcttcgaaggtgttggtgcagggggagcaaaaacagggccagctgctgttgaacaatttcggcgccgatctggcgcagggcgacctgaccggcgtggccagccgcgccgccgacggcagttggcaagtggatcgcctgcggctgagcggcgtgcgcatgcagaccccgttgacgctggcggaattcatgcagcgctttaccaccctgccgccggtcaccctcaagcgtttcgatctgatcgatgcgcgcctggaaggcaaggcgtgggcgtttaacgatctcgatctgtcgctgcaaaacgtcagcatcgaaaaaggcgactggcgcagcgaagacggctcgctcaacgtcaatgccagcgatgtgatcaacggcggtttccacctgatcgacccgatcgccaccctgcgcctctcctccgccggcatcgccattcagcaattcaccacccgctgggaaggcgggctgctgcgcacctccggcaattggctgcgcgccggcaaacgcctgcagctggatgaagtggccatggcggcgctggagtacaccctgccaatcgactggcgcgagctgtggctgaaaccgctgccggactggctggcggaggtgtacgtcaccaagctgaccaccaaccgcaatctgattatcgatatcaacccggcattcccgttccagatcaccgcgctggacggttacggcagcaacctgctgctggcgcgcgaccaccagtggggcatttggtccggttcgttaaacctgaacggcagcgaggccaccttcaacaaaatcgacgtgcggcgcccttcgctggcgctgaacgccgacgccaaccagatcgccgtcaccgaactcagcgcctttatgcccaatgggctgcttgaggccaacgcgaccgtcgatcagctgccgggcaagccgttccagctgacgctgcacggccgttcggtaccgctcaataccttgcagcaatggggatggcagccggtgccgctgacgggcgacggcaaccttgagctgcagttgaaagggctgttgaacagcgacgggccgttcaaagcttcattgaaggggactctgcaagccaccgccggcgacggccagacggtgaaccaacagctgccgtaatctatcgcgcggcccaccgccaggcagggccgccgttttactcttccagcgcttcggaaccgccctgatccagcggcacatccggctcggccggcaacaccatgtaagtgccttcgaacaccgcgcccttatcctcatcgccgaacagatgcacttcggcgtgcacgcgcgcgcggcggccccgcgccagacgcgccaaatcaccgcttagcgaaccgagatccgccaccgcccgcggcctgccggtgatcggtttgctgtagcgaatgtgcgcgtccgccagaatgatagtgccaccgagatggcgctcgcgcagcagcagccaaatcagcccccaggcggtcagcgtcgccagcgagaacaggctgccggcaaacagcgtatggtgcgggttctggttgccgatctccggcatggtggtgacgaagcgctggccggtgtactggctgatacgcacgcccatcttttcgctcagggggatatgttcataccaggcctgctgcaattggccgcaccaatcggggcgatgcaggatatcgtccagcgtcgctaccggtttgatcatcaaaaagtggcggatcggggtggtctgcggcgcagtgatctcgccctgattgacgaaccccagcttggcaaagaaatccaccgcatcttcacgggcgctgcacaccacccgcttcacgccttcctgccgcgcgacggactccagcgtcatcgccaccaacgtccccagccctttatcctgcagcgtcgggtctaccgccagaaaacggatcgccgcctcgttgtcggcattgatgtacagccgcccgatggcgacgattttaccggcctcgtccaccaccatttggtgatgggccatggcgtcataggcatccttttccgaacccaccggctggtgcagcggcttgcgcagcatttcccagcgaaactggtaatactctttcagttcttgctctgttacgggtactcgtaggtgatacatagacgcctgttctccgaatgcttagacctgtagccagaatgtcaccggaccatcgttgaccagcgccacctgcatgtcggcggcgaactcgccggtctgggtctctacgccgcgttcgcggcactggccaacaaaatattgatacaaccgatcggcttcttgcggcgcggcgccgcgcgagaagctgggccgcatgcctttgtgggtgtccgccgccagggtgaactgcgaaacgaccagcacgctgcccccggcctgctggacgttgaggttcatcttgtcgttctcgtcgccgaaaatgcggtatcccaacacgcgttcgcacaggcgctgcgctttttgctcgttatcgccctgctccacgcccaataacactaacaaaccggggccaattttgcctaccgtctcgccacccaccgtgacgctggcgtttaacacccgttgaatcaacgcaatcattcctgctgcccttctggttttggttcctgttgctccgccttctgccggcggtagtcgcgatattcgccgatggtcacggtgatttccgcgccaagtaacacgatacaccagctccagtagacccacaggaataaaatcgggatcaccgccagcacgccgtaaatcagctgataggaagggaacatggtgacgtacagcgcgaatcccttcttgcccagctcgaacagcaatccggccaccaccgcgccaatcagcgcgtctttgggcggcacgcgcaccgtcggcacgatgcaatacagcagccagaaggagatgcacgacaaaatcaacgggaagatgcgcagcacctgatccaccaggccattgacgccggtctgcgccagccagttgagcgacagcaggtaagaactgatggccatgctggcacccaccagcagcggccccagcgtcagcaccatccagtacacggcgaaggagaagacgatcggccgtttgttcttgctgcgccagatggtgttcagcacgctgtccaccgaggaaatcagcaacagcgcagtgacgatcagcccgcaggtgccgacggcggtcatcttgttggaattggcgacgaactgttccaggtagttctggatcacgttgccggcggccggcacgaaattggaaaagataaagctcttcagctgctcgctgatgtcggaaaacatcgggaaagccgcgaacagcgcgaacaccacggtgaccagcggcaccagcgacagcagggaaacataggcgagatggcccgccaacatcgtcaggccatcatgatcgatacgctggtacagcagccgtccgaaggtgacgccgggcttaatcgcagagggcagcttcttgcggcggaaaaacgacatggtcactccttgatgtccgttgatacgccttaagcttaacgcgccctgcgctcattgagcaaaataggccggcaccacgtcgcgatcggtgacgtgcaccgtcttgatccccagcgcctgcgcggcgaggacgttcgccgggtgatcgtcgaagaacaccgcgtcggcggcggcggtgttttccgcggccagcacatgttgatagatatcggcctccggcttgcgcatgccgagatcttgcgacaaatagagatgatcggcggcggcggccacttcaggatagtgctgcggccagtagttgcagtgcagacggttggtgttcgacagcaccaccacccggtggccttcgttgcgcaggcgctgcatgatgtcgatcacttccgggcgcagcgcgacaaataccgcctgccagccggtggcgaattgttcgaagctgagcgcaatgcccatttcatcgcacagcttgccggcgaagtcttcatcgctgatttcaccgcgctcatgttgctggaacaccttacccatggcgaaacgatcggacagcaccgccaacggcgtgccgctcaaattgctccacacgcccagcacacgcttgaaatcgatatcgacgatcacattacctaaatcaaagatatacagcatagtcctctcctgatgggccggtgagatttcactgtagcgggaaaaggaacagctgaacagggagcgaacggaaaagcgcatagcgcgccgcacaaacggggaacaacagaggaaaaaactcagggcgcgagaaccgcgccctaagcatgagacactcaatcagcgattaagcgtctttaggaccgcggctggcacgcttacgatcgttttccgtcaggtgacgcttacggatacggatcgaggttggcgtcacttctaccagttcgtcgtcatcgatgaactccagagcttgctccagggtcattttgatggccggaaccagggtagtcgcttcgtcagtaccggaagcacgcatgttggtcagcttcttaccggtcaggcagtttacggtcaggtcgttggaacgtgagtgaataccgatgatctggccttcatacacttccgcaccgtggcccaggaacagcttgccgcgatcctgcaggccgaacagcgcgaacgcgaccgctttgccttggccgttggagatcagcacgccgttctgacgctggcccacttcgcccggacgcacgtcgtcgtagtggctgaaggtggagtacagcaggccggtacccgaagtcatggtcatgaattcgttacggaagccgatcagaccgcggcttgggatcacgtagtcgagacgcacgcggcccttaccgtccggatccatgtttttcaggtcggctttacgctcacccatcgcctgcatcacggaaccctgatgctgctcttcgatatccagcgttacgttctcgaatggctcctgcttgcggccatcgatttcgcggaagataactttcggacgggaaaccgccagctcgaaaccttcgcgacgcatgttttcgatcagcaccgacaggtgcagctcgccacgaccggatacgcggaaggcgtccgcatcgtcggtttcttcgacgcgcagcgccacgttgtgcaccagctctttgttcagacggtcaaggatctgacgcgaggtcacgtacttgccttctttaccgcagaacggcgaggtgttgacgttgaagaacatggttacggtcggttcgtcgacggacagcgccggcagcgcttctacggcgttggtgtcgcagatggtgtcggagatgttcagctcgcccaggccggtgatggcgatgatgtcgcccgcttccgccagggtgctgtcgatacgctccagacccaggtgacccagcactttacccactttaccgttgcgagttttgccttcgctgtcgatgatggtgacctgctggttcggcttcactttaccgcgcttgatgcggccgatgccgataacgcccaggtagttgttgtagtccaactgggagatctgcatctggaatggcgcttccagctcaacctgcggcgcagacacgtggtcgacgatcgcctgatacagcggggtcatgtcttccgccatgtcggtgtggtcgacgccggcgatgccgttcaacgcagaagcgtagatgatcgggaagtcgagctgctcgtcggtcgcgtcgaggttcacgaacaggtcgaacacctgatccacaacccagtcagggcgcgcgccaggacggtcaaccttgttgatgaccacgatcggcttcagaccgttggcgaaggccttcttggtcacgaagcgggtttgcggcatagggccatccattgcatccacaaccagcagcaccgagtcaaccatcgacatcacgcgctctacctcgccgccgaagtcggcgtgtcccggggtatccacgatgttgatacggtaaccgttccaattaatggcggtgttttttgcgaggatggtaatcccacgctctttctccaaatcgttggagtccattacgcgttcggtggcttccgcacgctctccgaaagtaccggattgttgcagcagcttatcaaccagggtggttttaccatggtcaacgtgggcaataatggcgatgttacgcaaattttcgatcacagctttgcctcgggcattagaaatagcgcgctattgtacacgtattaagcgagggactaaacaagatcacaaccatctcttataaacaaccgcgtaccggtcagtttgtgatccctttcacggtgcaaaaagccgcaatcgttgcacttttgcaccatttcagtgcccacgcccaccccaattgcaccattccggtgcaatttatcactgatggtgcatactgtggttgggtaaaacccgcgcagaaaggcgatgaaagccttttttaaaagttggcacgcttttcgctttagtcttttcaaggcgaaaaaaagccagttccacagattcgttccacgacgacgacaatgataaaccgggagagttaagtatgtccgctgaacacgttttgacgatgctgaatgagcatgaagtgaaattcgtagacctgcgtttcactgacaccaagggtaaggaacagcacgtgactatcccggctcaccaggtaaacgccgacttcttcgaagaaggtaaaatgtttgacggctcctctatcggtggttggaagggcatcaacgaatctgacatggtgctgatgccggacgccagcacggcggttctggatccgttcttcgaagaacctacgctgatcattcgctgtgacattctcgagccgggcaccatgcaaggctacgatcgcgacccgcgctccatctccaaacgcgccgaagacttcctgcgctcctccggcatcgcggacaccgtgctgttcgggccagagcctgagttcttcctgttcgacgacatccgcttcggcagcagcatccgcggttcccacgtggcgatcgacgatatcgaaggcgcctggaactccggcacaaaatacgacggcggcaacaaaggccaccgtccggcggtgaaaggcggttacttcccggttccaccggtcgactcttcgcaggatctgcgttccaccatgtgtctgaccatggaagagatgggcctggtggttgaagcgcaccaccacgaagtggcgaccgccggtcagaacgaagtggcgacccgcttcaacaccatgaccaagaaagccgacgaaattcagatctacaagtacgtggtgcacaacgtggcgcacgccttcggtaaaaccgcgaccttcatgccgaaacccatgttcggcgacaacggttccggcatgcactgccacatgtcgctgtccaagaacggcaccaacctgttcgccggcgacaaatacggcggcctgtctgaaaccgcactgttctacatcggcggcatcatcaagcacgccaaggcgatcaacgcgctggccaacccgaccaccaactcgtacaaacgtctggtgccaggctacgaagcgccggtgatgctggcttactccgcccgtaaccgctccgcgtccatccgtatcccggtggtcgccagcccgaaagcgcgccgcatcgaagcccgcttcccggatccggcggctaacccatacctgtgcttcgccgcgctgctgatggccggcctggacggcatcatcaacaagatccaccctggcgatgccatggacaagaacctgtacgacctgccgccggaagaagaagccgagatcccaaaagtggccggctcgctggacgaggcgatggccgcactgaacgaagaccgcgagttcctgacccgcggcggcgtgttcaccgacgatgcgatcgatgcctacatcgaactgcgcaaagaagagatggaccgcattcgcatgacgccacacccggtcgagttcgaactgtactacagcgtctaagccctacccgcgccgtctgaaaaggcggacggcgcccacaatttttgttatcgcttttttgttgccgtggaaactttcagcccatcttcggatgggtttttttctccaccgtattttctgcaaaactattccataccgcgcctatcccggatggagtaggatagatgcactaaaaaggtgcaggagtctgctgtatggcaactggcaagctgcccgatgctgggcagatcctcaattcactcatcaacagcatcctgctgttggatgactcactggcggttcactacgccaacccggcggcacagcagctgctggcgcaaagctcccgcaagctgttcggcacgccgctgcccgatttgcttggttatttttcgctgaacgtctctttgatgcgcgaaagcctgcgcgccgggcagggcttcaccgacaacgaagtaactctggtggtcgacggccgcgcgcatatcctttccctgaccgctcaagcgctgccggaaggctatatcctggtcgaactggcgccgatggacaatcagcgccgcctgagccaggaacagctgcagcatgcccaacaggtggcggcccgcgatctggtgcgcggtttggcgcacgagattaaaaacccgctgggcggcctgcgcggcgcggcgcagctgctggccaaggcgctgcccgatccggcgctgaccgaatacaccaaggtgatcattgagcaggccgatcggctgcgcaatctggtggatcgcctgctcggaccgcagcggcccggccagcacatcacccaaagcatccatcaggtcgcggagcgcgtctgccagctggtgtcgctggaaatgccggataacgtcacgctggtgcgcgactacgatcccagcctgccggaaatggcccacgacccggatcagatagagcaggtgctgctgaacatcacccgcaatgcgctgcaggcgctgggtgaggcgggcggcaccatcacgctgcgcacccgcaccgcgtttcagattacgttgcacggcacccgctatcgcctggcggcgcgcatcgatgtcgaagacgacggccccggcgtgccggcgcagctgcaggacacgctgttctacccgatggtcagcggccgtgaaggcggtaccggcctgggattatccatcgcccgcaatctgatcgatcagcattgcggaaaaattgagttcaacagttggccaggtcataccgaattctcggtctacctgcccattcgccagtgaggtttgcaatgcaacgagggatagtctggatcgtcgatgacgatagctccatccgctgggtgcttgagcgcgcgctcaccggcgcgggcctgagctgcgccaccttcgaaggcggcaatgacgtgctggaagccttggccacgcaaacccccgacgtgctgctgtccgatatccgcatgccgggcattgatggtctggcgctgctcaagcagatcaaacagcgccacccgatgctgccggtgatcatcatgaccgcgcattcggatttggacgccgccgtcagcgcctatcaacaaggggccttcgactacctgccgaagccgttcgacatcgacgaagcggtggcgctggtcgagcgcgccatcagccattatcaggaacagcagcagccggtgcgcagccagccggccagcgatccggcggcggacatcatcggcgaagcgccggcgatgcaggacgtgtttcgcatcatcggccggctgtcgcgttcgtcgatcagcgtgctgatcaacggcgaatccggcaccggtaaagagctggtggcacatgcgctgcaccgccacagcccgcgcgccaaatcaccgttcatcgccctgaatatggccgctattcccaaggatctgatcgagtccgagctgttcggccacgagaaaggcgccttcaccggcgctaaccaaatccgtcaggggcgctttgaacaggccgacggcggcacgctgttcctcgacgagatcggcgatatgccgctcgacgtgcaaacgcgcctgctgcgggtgctggcggacggccagttctaccgggtcggcggctatgcgccggtgaaggtcgacgtgcgcatcatcgccgccacgcaccagaacctggagctgcgggtacaggaaggcaagttccgcgaggatctgttccaccgcctgaacgtgatccgcgtacacctgccgccgctgcgcgagcgccgggaagacatcccgcggctggcgcgccacttcctgcagatcgccgccaaggagctgggcgtcgaggccaagaacctgcatccggaaaccgaaaccgcgctgacccgcctgccctggccgggcaacgtgcgccagctggagaacacctgccgctggctgacggtgatggccgccgggcaggaggtgctgattcaggatctgccgggtgaactgttcgaaaccgccgcgccggaaagccccagccacagtctgccggacagctgggccacgctgctggcgcagtgggccgatcgcgcgctgcgttccggtcatcaaaatctgctgtcggaagcgcagccggaaatggagcgcacgctgctcaccaccgccctgcgccacacccaagggcacaaacaggaagccgcgcgcctgctgggctgggggcgcaataccctcacccgcaagcttaaagagctgggcatggaataggaacggggtggatgatgaaaaacgcagtccggcgcacaaaaaaacgccaaccacagactttacagccggcgcgggcgcagtatgatcttgtcgcacactctggaggttgacgatgctggactcattcatcgtattcatttctcagggcgcggagctgggctccgccgccagccacaccccgcaggcggcggtcgccgcggtgttgtgcgccgcgctgattaacttcttcagttaaaaaaacagccgcatcagcggctgttttttcatcctcagatcacccgagagaactgctggctgcgcgcctgttgccgcagatagcggtcgaagcacatgcaaatattgcggatcagcaagcgcccgcgcggcgtgacgcgaatgccctgctcgtcgcgctccaccagcccatcgcgttcaaacggcgccagcagctgcaggtcttcggcgaagtaagcggtgaaatcgatgccgtattgccgttcgagcggctgatacgccaaccggaagttgcagatcagggttttgatcagatcgcgccgcagacaatcgtcgtccgtcagcgccagcccgcgccacagggcgttgccctgcgccggtacgctgtcatagtaacgcttcagctctttctggttctgcgcatagctgtcgccgagcatgctgatggccgacacgcccaaccccagcagatcgctgtcgccctgggtggtgtagccctggaaattgcggtgcagcttgccttcgcgttgcgcaatcgccagctcatcgtccgggcgtgcaaagtgatccatgccgatgaactgatagccggcgtcagtcaggaacgcgatgctctgctgcaggatatccagcttctgctgcgcgctgggcagatcggcgtctttgattttgcgctgggcggcgaataaattcggcatatgcgcgtagttgaacacgctgaggcgatcgggattcagttcagccacccgctgcagggtgaaggcgaaactttccggcgtctgtttcggcaggccgtagatcagatcgatattggtcgagcggaagcccagcgctttggcccgctcgatcagggcgaaaatgaaggcttcatcctgctcgcggttgaccaactgctgcacctgcttgttgaaatcctgcacccccatgctcaaacggttaaagccttcggcgcgtaaatgatcgagcacatccagcgctatctcgcgcggatcgacttcgatcgacatctccgcatcgggcagaaaatcaaaatgttcgcgcagcaccgccaccagccggctgatttgcgctttatccagataggttggcgtaccgccgccccagtgcatctgaccgaccttgcggccggcgaacagcggcgcacggctggcgatctcttgcgccaggacattcaggtattcatcggccttgtgcgtctggcgcgtcaccagtttgttgcagccgcagaagtagcacagcttatggcagaaagggatatgcacgtacagcgacagcggccgctcagggtagcgcgccgcggcgcgttgaaacgccgcttcgtcgtagcgctggttaaattccagcgccgtggggtatgaggtataacgcggccctgagtagttatatttttggatcagggccaaatcccagacaatcgtctgctctgacatgctcactccttccgatatctttttctaccgggccgggagaggggcggttgtctgcgctgtctggccacggaagtgctgcgaaaacgcgctttgcgcttagacagcccccatagtttaccgaataaccacagcagataacacatcaagagtagggctattgtcgggatcagccacatggcgcgttaaaaggcgtccttcgggttgccgcctttcagcagcttcagaatatcttcctgcttctcttcttcttcctcgtcgtcttcatcgcccagctcgatgcccagcacgtccatcagcacatcgatacgatccagcgtcttgtcgacatacgcctgctcttgcgcgttcagcgtttcgccatcgtcgatgcgatccagcagcgcgttcaggcgttcgtcattttccagcttcgccagctcttcttccggcgacaggcgcggtttcgcttcggcctttggcttcggctgcggtttggccttcactttggtttcgtcgaccaccagcgcaaccggcactttactgccgatacgcggatctttggcttccgccgccgatttgtttttttggctgccggactcaacctgggtgcgtgaaccggaagcgtggccgcggcgctttttcaggcgtttgcgctcgcgcgcttcctgatcgagctccatacggcttttctttttcgtttttgacttcgccgcgctgccgcgaggtgcttttgatggctggttcatagcgtgtgctcttaggtatgtagattcagtatagaattgcggcggaatctagcagaaagcggacaaagaaaaaaggcggcaggttaaacctgccgcctatttcgcaccttcttgcgaagggtattcctgttacgcgctccttgcgtacatgcaacatcccggtttttccttctgctataaccgcattccctgccactacgtccttcatcctgaaaggaaaatcgtccatggcgcaatcctttcgcatccgctcttcccgagcgcgcttcctgcgggcatccaaactgccgatacttcaccatccgatgtgcctgccgcctattccggtgcgaaagggtcacttccttttgcgttcatcctggcactcattgcacgccctgtgcattccctgagatttgtcatccttcccggatgttccctaatcctgcgcaaccctgcgttaacgagtactttacgttattgttgcgaaggctcaaggcacctgacgccgatttgactgacattttcacacaacgaaaaaataatatgttgtttttaaaataaaaacataaatatcactttcgaataaagcgacattacccgcgattcgaatggcaaatgtctcacaacgtacggtcggcttaactgttgttttatcgcgccccaccgcttaaaaacggagaaacacgccatttttaccgctgatgcagttataatcgccaaccagttagccatcctcacggagacgaaaaattttgaccagcaagaactacaactatcatgtgacccatttcgtcaccagcgcacccgatattcgccatcttccgggggatgcaggaattgaagtcgcctttgccggccgttccaacgccggtaaatccagcgcgctgaatacgctgaccaaccaaaaaagcctggcgcgcaccagtaagacgccggggcgcacccagctgatcaacctgttcgaagtggaagacggcattcgtctggtcgacctgccgggttatggctacgccgaagtgccggaagaaatgaagcgcaaatggcaacgcgcgctgggcgaatacctgcagatgcgcaacagcctgaaagggctggtggtgctgatggatatccgccatccgctgaaagatctcgaccagcagatgatccagtgggcggtcgacgtcggcacgccggtgctggtgttgctgaccaaggccgacaagctggcctccggcgcacgcaaggcacagctcaacatggtgcgtgaagcggtgctgccgtttatgggggatatccaggtcgaagccttctcatcgctgaaaaagatcggcgtcgacaagctgcgccagaagctggacacctggtttaacgagatcccgccggaagtgctgccggaagaggacatcggcgaataagccctgatcgcacgtttgagccgatgtcttaccgcatcggcttttttatgcccgcagatcggccgcaggcgggattttttgttatctaattacacttttgaaataaagccatcataaagacttattgccaaaacgggcttgtctcgccgaattacgcggattgagggagcggaagctgaaatgaaaagcggggccgagcgataggaaaaacgtatggtttgctgctgtttttacaataaaaaacgccccagtcaatactgactggggcggctaaatattcagccaaatccgattacgtgaagtaaaaggtctgaaagatagaacatcttacctctgtaccctacgcctgtaactctacatcattttttcgcagggaaaaagaattttttgtagtttacttacacaatttgcggcgcaagaacggcgaagttggggaaactatcgccgcatcttgtagcttaattacgaaaagagcttagcttctcgccagttagcgcatacggcgataacccggcgatcagtgcgcttcatcccagttcatgccgacgcccacatcgaccttcagcggcaccgccagagccatgctgccttccatcagttggcggatgcgctggctggcttcttcgatcaccgattcatgcacctcgaacaccaattcatcgtgcacctgcatgatcgcgcgcaccaacggcttctcctgcccttgcagccaggcgtcgacctcgatcatcgcacgcttgatgatatcggctgccgtgccctgcatcggggcgttgatggcggcgcgctcggccgccttgcggcgcatggcgttgctggagcggacgtccggcagatacagacggcggccgtccagcgtgctgacatagccctgctcggaagcctgctgacgggtgcgctccatgtaatccagcacgcccgggtaacgctcaaagtagagatccatatagcgctgggcttccccacgcgggatccccaactgacgcgccaggccgaaggcgctcatgccgtaaatcaaaccgaagttaatcgccttggcgctgcggcgctgctcgccggtcactttatccaacggcacgccgaaaacttccgacgccgtggcgcggtgaatgtctttcccttcggcgaaggccttcagcagcccctcatcctgtgacagatgcgccatgatgcgcagctcgatctgcgagtagtcggccgcaacgatgcggtagccttccggcgcaataaaggcctggcgaatgcgccgcccttcttcgttgcgcaccgggatattctgcaggttcggatcgctcgaggagaggcggccggtggcggtcaccgcctgatggtacgaggtatgcacccggccgctggccggattgatcatcaacggcagcttgtcggtataggtggtcttcagtttcgccaggccgcggtattccaggatcaccttcggcagcgggtagtccagcgccagctcggccagcacctcttcgttggtggacggcgccccgcccggggttttcttcagcaccggcagcttttgtttttcgtacaggatcgcctgcagctgcttggtcgacgccaggttgaacggctcttccgccagctcgtgggcctgcgcctccaactctgccagacgcttggccaactcctgggagtgggccgacaaaatggccggatcgatcagcaccccggtgcgttcgatatgcgacagcaccggcagcagcggcatttcaatctcattgaataccgtcagcagttccgcgctctgtttcagctgcggccacatcgccaggtgcagctgcagcgtgacatcggcatcttcggcggcgtaaggcgccgcctgctccagcgcgatctgattgaacgtcagctggtttttgcccttgccggcgatctcttcgaaggtgatggttttgtggcccagataacgatcggccaggctgtccatatcgtgacggccgccgacgctgtccagcacataggactccaacatggtgtcgtaggcgatgccgcgcatctcgatgccgtagcgcgccagcaggctcatgtcgaacttcaggttttgcccgaccttgagcgccttctcgtcttccagcagcggcttgagcgcctccagcacataagcgcgatccagctgtgccggcgcatccaggtaatcgtgcgccaccggcaaataagccgcttcgcccggcgcgatcgcgaaggacaggccgatcaggttggcggtcagggtatccagaccgtcggtttcggtatcgaaggcaaacacgtcggcctttttcagccgagccagccagtcggtaaaggtcgcttcctccaggatagtgacatacccgtcctgggacagcttggcttccgccaaggctttcggcgcttccacggcggctgccggtttggcggcgccggcagctttcgcgcccgcgcctttcttgttttccagccagacgccggcttccacgtccgccagccagcgtttgaactcgtactgtttgaacagctgttgcagcgtatcgacatccggctcagataccgtcaggtccgcgcaggtcagatccagttcgacgtcggttttgatcgtcgccagcttataggagaggtacgcgacctctttgttctgctccagcttggccgccatagttttggcgccgcggaagctcagcgtggcgatgttctccagattgccgtacagcgcatccagcccgccgatcccctgcagcaacgcctgggcggttttctcgcccacgcccggtacgccgggaatgttgtccgatgaatcgcccatcagcgccaggaagtcgatgatcaactccggcggaatgccgtatttgtcgcacacttcctgcgggccgaggatcgtgttgttcatggtgttgatcagggtgacgttcggcgtcaccagctgcgccatgtctttgtcgccggtgctgatcagcaccgcatggccggccttttcggcctccagcgccagcgtaccgataacgtcgtccgcctcaacgccgggtgtcaccagcagcggcaggcccatcgccttgaccatgctgtgcagcggctcgatctgcgcgcgcagatcgtccggcatcggcggccggtgtgatttgtattcagcgaagagatcatcgcggaaggttttccctttggcatcaaacaccacggcaacgtggctcggttgatactgcagcagcaggctgcgcagcatattcagcacgccgtacatcgcgccggtcggctcgcccgccgagttggtcagcggcgggaaggcgtgataagcgcggtagaggtaggaggaaccgtcaaccaggattagtgggttttctgcaatctgggccatagcgtttctttatcgtgatcggacatagaggtaagcatgccatagctggccgccggagacgaaccttagcgtgcattgcggacgaaaatgatgtgattgtgtgcgaggatccgcaagatcttacctgtggataactttgtgcatagaaaagagaccgaattataacgctgcgattatcgttataacggcgaataaaattcctatttaaatcaccgcgttaaaagaacgaattccggcgatgctttattactggcatttattgaatttgtggatataactttcgccggattttaatcgcactattaatcaaattcggcgcctcaattaccatagcacaagctggacaagttgcacgaaaactcagcaaatggttatccatcgagacgaaaaacagtgatttttagcggcgctttaccccggcgatttctgttaaaatgcgtttttgttcatgcgctttggcatgcaacgatgttcccaacaaccgtcagcccataatcatgccaagattgttaacgcctgttatctttatcatttccgtcatacttaccattctggtgacggtgttgtgctccatccccatcacgctggccggcatcgtgaaactcctggtgcccattcccgccgtctggcgatatatctcggctttcgccgatttcatgatgtggtgttggtgccaagggctggcgctgttattgcgcattaacgggcaattgcgttgggatattgaagggctggaagggttggatcgcaaaaactggtatctgctgatcagcaaccacgaaagctggtcggacattgtcgtgttatgcgtgctgttcagaaatcatattccaatgaataagtatttcctcaagcaacagctcgcctgggtgccttttgtcggcctggcctgctgggcgctggatatgccattcatgaagcgttattcccgcgcctatttgctcaagcatccggaaaagcgcggcaaggatatcgaaacgacgcgccgttcctgcgaaaaattccgccagcgtccaaccaccatcgtcaatttcgtcgagggttcacgcttcaccgaagccaagaaaattaaaagcaattcgccgtatcgcaatttgctggcgcctaaagccgccggcatcgcgtttacgctcagcgcgctgggcaatcagttcgacaaagtgttgaacgttactctgctctatccggaaaataaccagcggccttttatggatatgctgtgtgggcggctgacgcgtatcgtggtgagaatagagacgctgccgatcgatgaaaccctgcacggcgactacttcaacgacaaacagttcaagcggcgcttccagctgtggctgaatacgctgtggcaggaaaaagaccggttgctggataaattgaagcggcaatacggataaaaaaacgccggcgatgccggcgtttttcatattgaatcaggcttatttctgctggctgaggaatttaaccacatcggcgaactgcttcacgtaagcgtccatcgagctggtgtccaggccatcgtttttaaccatgtatttgccgttgacgaataccgccggcacgccgcgcagctgcagatcttctgcggctttctcctgttgaaccaccagagatttcaccacgaagctgttccaggccgcgtcataatctgcagcggtcacgcccgctttcacgaagacgttgcggatatcgtccggcgtttgcacggtctgggttttctgcaccgcttcaaacatcagcgggctcaccttgtcttccacgcccagcgccatcgccaccgcccacgcctgagtcagctgtttgcccaacggccccaggaactccacgtggtacttggtcattttggtgccggcaggcagcgctttctttacgttctcagacacatgatagacctgctcgaactggtagcagtgcgggcagtagaaggagaagaactccaacacctgcggctcgccggtcaccggtttgtccagagtcacatactgagcgccatcgctaaactgtgccgccgaggcgctgaatgccatcaccatgccaacgagcgccaaccatatttttttcataagactaaactctccattgtgttaaagcttcaatacattggcgtcagctgcagagggggctcctgcaacagcttaacctgttcggtgaaggccacagtctgagacaaccagaaatcagactccgccatccacggaaaactcttagggaaggccggatcctgccagcggcgagcgacccaggccaggtaatacaccatgcgcatcgcccgcagtggttcaatcaacgccagctcgcgctgatcgaactcggcaaattcgctatacgcctccagcaagacatccagctgcatcagttgatcgcgacgttcgccatgcagcaacatccacagatcctgcactgccgggccgttgcgcgcgtcatcaagatcgacgaacagcgggccatcgcgccacagaatattgcccggatggcagtcaccgtgcaaacggcgcggctgccagttcagatgccagtgcgacttgatcgccgtaatcagattatccgtcgcctgcaggaacgcgtcacgctgcgttgccggtagcagcccgcaatcggccagcacctgacgcgggccggtgaggtactcttcaatccccatcgttggccgctcagcgaacaaacgctcaccgccgacctggtggatacgccccaaaaaacggcccacccattccaactgatccagattgtctatctcgtattgccggccccccacgctggggaacagggcaaagaaaaaaccgccgtgcgtatgcagggtagcgccttgcagcgccaacggcgccaccgccgggatctccgcgccggccagatccagagcgaactgatgttcctcaccgatctgtgcggcgctccagcgctccgggcggtaaaacttcaccacgtagcgccggcgatcttcgtccataaactgatagacgcggttctcgtagctgttcagcgccgtgaggccggaatcgacgcgcaggccaactccttctagcgcgtccataatcaaatcgggcgacagggtttcgaaattaaaagcagagttattcataacgttcgtttgatcgctgacagcacggtgccgggaatgagaaatagtagcattaatggcgcatttctcgcgctatgctttctcgcaccgcacgaggatcagtccttgataacgccgcgagcgcgcagcagcgccgttttaaaatcttcttcgtaatctttcttcagacccgggatctgatccgtgccggcgctaccgcgcattttcaggtgataaatgagaatgtcgtcgctcagttcggacaactcgccctggaagcccgcttccttcgccagcttttgcaaaaactgcatcaaattgagatcgggatcttcctgccaggccgggtgcaacagctcgatcaactcgtttacgcgatgcgttttcatctcaatatcgtccaatagcatgaataaactcacaaagtaacaggcttacccacacagtgaaagaaccggcttgtcaataaaggtaaatcctgatgtcacgcctgctttagcgctacaatcagcccatcgacaaggcgggataaacgagatgcataaagaaatcagcggcgtcattttggccggtggacgggccacgcgtatgggcggtgaagacaaaggcctggtgtcgattggtggtatcgcactctatcaacacatattggctcggttacggccgcaggtggcttccatcgtcatcagcgccaatcgcaatcaggcatgttaccaggcgagcggtttgccggtgattggcgatctgacgcccgatttcgccgggccgttggccggtatgctggccgggctcaagcaatcttccagcgaatgggtggccttcgtcccttgtgacgtccccgactttcccgctgacttagtggcacaactctggcggcaaaaaggcgcagcgccggctgcctttgccagcgatggcgaacgtgatcaccctacgctggcgttactgcatacccaactagcgccgcagctggccgactatctggcgcgcggtgaacgcaagctgatgctgttcttgcatcagattaacgcacaacgcgtggtgttcagcggacaacaagcggcatttcataacctgaatacgccggaagactgccgacattggcagcaaacacgagagctaaagaaatgaatcgttcattgcctcccttgctggccatcggcgcctacagcggtacgggaaaaaccaccctgctcaaacagctgatcccgttgctgaaacagcgtcaggtaaggattggactgatcaaacatacgcatcacgacatggatgtggatacgccgggtaaagacagctatgagctgcgtaaagcaggcgccgagcaaacgctggtcgccagcgatcgtcgctgggcattaatgaccgaaacgcaggagcaacgacctttggatctgcgctatctggctgggcgctttgacgccgataaggtcgacttgattctggtggaagggtttaaacatgagccggtcagcaagatcctgctttatcgggccaagatcggcaaaccgttggaagacatgttggatcagtttgtcgtggcggtagccagcgaccgaccactatccatctcagctaagcagctggatctcaatcaaccggaaagcatcgccgactttattgtcgagtggttgaaaggcgcagcgtagctgcgcttttttacgttttacgcatagcaaaaagccctgaacgtcagttcagggctttcggctttatttgatgcctggcagtgtcctactctcgcatggggagaccccacactaccatcggcgctacggcgtttcacttctgagttcggcatggggtcaggtgggaccaccgcgctattgccgccaggcaaattcgttttaatcaacccgcttcatcgctgaagcctgtcaatccaatctgtaaacaagctgaatattgtcttggtctcaccaaaacaccttcggtgttgtaaggttaagcctcacggatcattagtactggttagctcaatgcatcgctgcacttacacacccagcctatcaacgtcttagtcttaaacgttccttcaggggccttaaaggcccagggaagactcatcttgaggcaagtttcgcgcttagatgctttcagcgcttatcttttccgcacttagctaccgggcaatgccattggcatgacaacccgaacaccagcggtgcgttcactccggtcctctcgtactaggagcaacccctctcaatcttccaacgcccacggcagatagggaccgaactgtctcacgacgttctaaacccagctcgcgtaccactttaaatggcgaacagccatacccttgggacctacttcagccccaggatgtgatgagccgacatcgaggtgccaaacaccgccgtcgatatgaactcttgggcggtatcagcctgttatccccggagtaccttttatccgttgagcgatggcccttccattcagaaccaccggatcactaagacctactttcgtacctgctcgagccgtcactctcgcagtcaagctagcttatgcctttgcactaacctcacgatgtccgaccgtgattagctaaccttcgtgctcctccgttactctttgggaggagaccgccccagtcaaactacccaccagacactgtcctcaccccggatcacggggccgagttagaacatcaaacattaaagggtggtatttcaaggatggctccacgcagactggcgtccacgcttcaaagcctcccacctatcctacacatcaaggctcaatgttcagtgtcaagctatagtaaaggttcacggggtctttccgtcttgccgcgggtacactgcatcttcacagcgagttcaatttcactgagtctcgggtggagacagcctggccatcattacgccattcgtgcaggtcggaacttacccgacaaggaatttcgctaccttaggaccgttatagttacggccgccgtttactggggcttcgatcaagagcttcgccttgcggctgaccccatcaattaaccttccagcaccgggcaggcgtcacaccgtatacgtccactttcgtgtttgcacagtgctgtgtttttattaaacagttgcagccagctggtatcttcgactggcttcagctccatccgcgagggacttcacctacatgccagcgtgccttctcccgaagttacggcaccattttgcctagttccttcacccgagttctctcaagcgccttggtattctctacctgaccacctgtgtcggtttggggtacgatttaatgttacctggagcttagaggattttcctggaagcagggcatcaactacttctgcaccgtagtgcatcgtcatcacgcctcagggttaatatgcaaccggatttaccaggtcacaccccctacacgcttaaaccgggacaaccgtcgcccggccagcctagccttctccgtccccccttcgcagtaacaccaagtacaggaatattaacctgtttcccatcgactacgcttttcagcctcgccttaggggtcgactcaccctgccccgattaacgttggacaggaacccttggtcttccggcgagcgggcttttcacccgctttatcgttacttatgtcagcattcgcacttctgatacctccagcaaccctcacaggccaccttcaacggcttacagaacgctcccctacccaacaacgcctaagcgtcgctgccgcagcttcggtgcatggtttagccccgttacatcttccgcgcaggccgactcgaccagtgagctattacgctttctttaaatgatggctgcttctaagccaacatcctggctgtctatgccttcccacatcgtttcccacttaaccatgactttgggaccttagctggcggtctgggttgtttccctcttcacgacggacgttagcacccgccgtgtgtctcccgtgataacattcttcggtattcggagtttgcatcggtttggtaagccgggatggccccctagccgaaacagtgctctacccccgaagatgagttcacgaggcgctacctaaatagctttcggggagaaccagctatctcccggtttgattggcctttcacccccagccacaagtcatccgctaatttttcaacattagtcggttcggtcctccagttagtgttacccaaccttcaacctgcccatggctagatcaccgggtttcgggtctataccttgcaactaatcgcccagttaagactcggtttccctacggctcccctatacggttaaccttgctacaaaatataagtcgctgacccattatacaaaaggtacgcagtcacaccacgaaggtgctcccactgcttgtacgtacacggtttcaggttctatttcactcccctcgccggggttcttttcgcctttccctcacggtactggttcactatcggtcagtcaggagtatttagccttggaggatggtccccccatattcagacaggatgtcacgtgtcccgccctactcatcgaactcacgacctgtgcattttagtgtacggggctatcaccctttactgcgcgactttccagacgcttccactaacacacaagccgattcaggttctgggctcctccccgttcgctcgccgctactgggggaatctcggttgatttcttttcctcggggtacttagatgtttcagttcccccggttcgcctcatgccactatgtattcatgacatgatagtgtgtcgaaacacactgggtttccccattcgggtatcgccggttataacggttcatatcaccttaccgacgcttttcgcagattagcacgcccttcatcgcctctgactgcctaggcatccaccgtgtacgcttagtcacttaacctcacaacccgaagatgtttccatcgttcgcgctgcaaacatttgagagactctatgacaggttactcttcatcccagtacatctacggagggacaaatttcagccgtcatgtttcaattttcagcttgttccagattgttaaagagcaatatcttaaacatgactcggaagtcatctttaagatatggtgtatcgtcagatactgaagaccgccgctttcaccggatgggtcggaagcttggcgtcccctaggggattcgaacccctgttaccgccgtgaaagggcggtgtcctaggcctctagacgaaggggacacgacaccgtacttttatgacgcttttgctcgttactttttcatcagacaatctgtgtgagcacgccacgcgaagcaatatctttaggtaaggaggtgatccaaccgcaggttcccctacggttaccttgttgcgacttcgccccagtcatgaatcacaaagttgtaagcgccctcccgaaggttaagctacgatcttctttagcaacccactcccatggtgtgacgggcggtgtgtacaaggcccgggaacgtattcaccgtagcattctgatctacgattactagcgattccgacttcatggagtcgagttgcagactccaatccggactacgacgtactttatgaggtccgcttgctctcgcgaggtcgcttctctttgtatacgccattgtagcacgtgtgtagccctactcgtaagggccatgatgacttgacgtcatccccaccttcctccagtttatcactggcagtctcctttgagttcccggccgaaccgctggcaacaaaggataagggttgcgctcgttgcgggacttaacccaacatttcacaacacgagctgacgacagccatgcagcacctgtctcagagttcccgaaggcaccaatccatctctggaaagttctctggatgtcaagagtaggtaaggttcttcgcgttgcatcgaattaaaccacatgctccaccgcttgtgcgggcccccgtcaattcatttgagttttaaccttgcggccgtactccccaggcggtcgatttaacgcgttagctccggaagccacgcctcaagggcacaacctccaaatcgacatcgtttacagcgtggactaccagggtatctaatcctgtttgctccccacgctttcgcacctgagcgtcagtcttcgtccagggggccgccttcgccaccggtattcctccagatctctacgcatttcaccgctacacctggaattctacccccctctacgagactctagcttgccagtttcaaatgcagttcccaggttgagcccggggatttcacatctgacttaacaaaccgcctgcgtgcgctttacgcccagtaattccgattaacgcttgcaccctccgtattaccgcggctgctggcacggagttagccggtgcttcttctgcgagtaacgtcaattgatgaacgtattaagttcaccaccttcctcctcgctgaaagtgctttacaacccgaaggccttcttcacacacgcggcatggctgcatcaggcttgcgcccattgtgcaatattccccactgctgcctcccgtaggagtctggaccgtgtctcagttccagtgtggctggtcatcctctcagaccagctagggatcgtcgcctaggtgagccattaccccacctactagctaatcccatctgggcacatctgatggcaagaggcccgaaggtccccctctttggtcttgcgacgttatgcggtattagctaccgtttccagtagttatccccctccatcaggcagtttcccagacattactcacccgtccgccgctcgtcacccagggagcaagctcccctgtgctaccgctcgacttgcatgtgttaagcctgccgccagcgttcaatctgagccatgatcaaactcttcaattaaaagcttgatttgcttccactcgagaagcgatgctcaaagatttactgcatgaattttacttcagttagtcactcttcaagacttgatattttttgcatccgaagatgctggatatcgtcttgtggagtgcccacacagattgtctgataaattgttaaagagcagtgagttaggcgctttcgcttgctaactcgaggtggcgtatattacgctttcctctttcagagtcaaccctaattttcaggattttttctctgcgacccccggatactctgtgaagttgttcacatgttcccggtcagtggaggcgcattatagggagttctcggcaggccgcaacccctaattgcaaaaaacttttcaagcgcggattttttcaacaaaagggcgaaaaagcggcgaattaatgtcactttttcaggtaaacagccataaaagctggcgatcactggagtaaaatagaaataacgatgtcagtaaggatccgcagccatgccgttaaatgcacaacaacaggccgcccaacgcaatctttcttatctgcttgcagaaaaactcggccaacaaattctggcaggcgattatcaggccggcagcatcctgcctggtgaaatggaactgggcgagcaattcggcgtcagccgcaccgcggtgcgcgaagcggtaaagatgttagccgccaaaggcatgttgttgccgcgcccgcgcattggcacccgcgtgatgccgcaaagccaatggaatttcctcgatcaagatttactgacctggtggatgacgcgggaaaacttcgatcaggtgatgcaacacttccttatcttgcgcacctcgctggagccgcaggcctgcgcgttggcggcaaaccacgccagcccgcaacaaaccaagttgctggcggggctgatggcggaaatgcgcgcgctgcatacccagtttgatcgcgagcgttggatccaggtcgatacccaattccaccagcttatctacgaggccagcggcaacccgttcctgacctcgttcgccaacctgttcagttcggtgtaccaaagctacttccgcgccatcaccggcaatgaagtgatcaagctgcgccatcatcaggctatcgtcgatgcgatactcgccggagacagcgcaggcgcactcgtcgcctgccaggtgctgctgaaagagaaagactagacacgctccccgcttatatatagaagaaagagacgagggacagacgaccatttaaccaggaccgaccatgacccaatccgcgcgcagtatggcaggactaccgtggatcgccgcaatggcgttctttatgcaggcgctggacgccactatcctcaacaccgcgctgccggcgatcgcccaaagcctggggcgttcgccgctggcgatgcaatcggccgtcatcagctacacgctgacggtggcgatgctgatcccggtcagcggttggctggcggaccgcttcggcacccgccgcgtgttcatcttcgccgtcacgttattcaccctcggttcgctgttgtgcgccctctcccccacgttgagcgtgctggttgcctctcgcgtgctgcagggcatcggcggcgcgatgatgatgccggtcgcgcggttggcgctgctgcgcgcctacccgcgcagcgaactgctgccggtgctgaacttcgtcaccatgcccggcctggtcgggccaattctcgggccgctgctgggcggctggctggtaacctacgccacctggcactggattttcctgatcaatatccctatcggtctgctcggcatcttctatgcacgcaaatacatgccggacttcaccacgcccaaacgccgcttcgatttccttggttttatgctgttcggcctgagtctggtgctgatctctaccgggctggaactgtttggcgagcgggtgctggcgagctacgtttcgctgggcattctgctcagcggcttcgtgatgctgttcggctacatcgcgcacgcacgccgccaccctcagccgctgatcggtctcgacctgttcaaaacccgcaccttctcggtcggcatcgccggcaacgtcgcctctaggttgggcaccggctgcgtgccgtttttaatgccgctcatgctgcaggtgggattcggttacacggcaatcgtcgccggttgcatgatggcgccaaccgccatcggctcactgatggcgaaatccaccgtcactcaggtgctgcgctggttcggttatcgtaaaacgctggtcggcatcaccgttatcatcggggtgctgatcgcccagtttgccctgcaaagcccgggcatgccgctgtggctgatgatcctgccgctgttcgtgctgggcatggcgatgtccacccagttcaccgccatgaacaccatcagcctggcggatttgaacgacgccaacgccagcgccggcaacagcgtcctggcggtcacccaacaactgtccatcagcttcggcgtggcgatcagcgcggcggtgctgcgtttttacgaatccctgtcgttaggcaccatgatcgaccacttccactacacctttatcaccatggggatcgtcaccgtggcgtcggcgctggtgtttatgttgctgagaaggaaagatggccgcaatttgatcagcggccaggaaagcaagaaagaagcgaaggcggccagttaacggcggcccaccgaagcgcgttccaccagctcgggcgtcagcaccagcacctggggcgcgcgctccgggttttgcaggcggttgatcagcgcatcgatcgccagctcgcccaacgaatccttcggttgatgaatggtgctcagcggcggcgccagataacgcgccagctcaatatcatcgtaccccatcaccgccatatcctgcggcacggaaagcccggcctgatacagcgcctgataaacgcctaccgccaccgcgtcgttgccggcgaacaccgcatgcggcggttcgtccagcgccaacagttggcgcatggcgttcacgccgccctcaaactcaaagtcgcaatgcacttcataccctgtcggaaccggtaatccggcgcgacgcatcgcgttgcgatagccttccagccggtgacgggcggtggttttatcctgcgggccggcgatgcaggcgatcttgcggtagccgcgggcgatcagatgatcggtcgccatctcgccgcccagcagcgagttatcctgaataatatcgttcgcgccctcgaacggcgcccagtccatcatcacgatcggcaatgacgggtagcggctcagggcatcttgcgatggccggtggttttcggtgcacatcaacagcaaaccgtcgacgcgcttttgcagcagcgtctccatgctgcggttcatgcgcgcggcgtcttcttcggtattgcacaggatcagactgtagccacgttcatagcagctgcgctccacgccgcgcaccacttcagcataaaacgggttgttgctggcggtcaccagcatgccgatggtgcgggtctgattaagcttcaggctgcgcgccagcgcagaaggcgcatagttcaactgttccacggccgccatgaccttgtcgcgcacgctgtcgctgacaaagcgattgttgttgaccacatgcgaaacggtagaggttgaaacgcccgccaggcgggcgacatctttcatggtggccaaaggatcacccctgttgctgcaagaaggcgtcaatctcttcgcgccacggcaccgaaggctgcgcgccggggcgggttacggcgatcgccgccgccgcatgggcgaaacgcaccgcgtcggccatgctgttgccttccaacagggcggtcaccagcgcaccgttaaaggtatcgccggcggcgatggtatccaccgcttgcactttgaagccgggcacccgtttgccgttgccgttttcgctcagccacacgccacggctgccgagggtgatgatcaccgtcgcgatgcctttgtcgtgcagcgcctgcgccgcgcgcgccgcatcggcgtcgttgtccacagcgatgccggtcaggcgctgcgcttcggtttcattcggggtgatcatatcaatcatccccagcagctcgtccggcagctcgcgcgccggggccgggttgaggatcacttgcgtttgatgttgcttggccaagcgggcggcggcgatcaccgtctccaacggcgactccagctgcatcagcagggcatcggcgtcgatgactttttgccggtagcgcgccaggtaatccggcgttaccgcggcgttggcgccggcattgatgccgatcacgttctcgccttcggcgttgacgaagatcagcgccacgccggtggtgctgtcggcgatggcttcaatcggttgggtatcaatgcgatcgctcgccagctgccggcggacacgctcgccgatatcgtcggcgcccacgcaggcgataaaggcgatctccgccccactgcgcccggccgccaccgcctgattcgcgcccttgccgccaaacgccaccttatactgcttcccgatcaccgtttcgcccgggtgggggaattgttcaatattgaggatatggtcggcattgatgctgcccagaaccaccagcttacctgtttccatcgcattgattcctgaattgcgcgccatcgtaaacgccccgtcccgatggcgctggtatgacttactgagtgaccagtttcaaatcgaccggaatggtcgccggcactttttcgcctttcagcactttatcggcggtttccacgcctatcacgccgatctgatcgggacgctgcgccacggtcgccgccagcttgccgccttcaaccgctttcacgccgtcggcggtgccgtcgaagcctaccacgatcacgtcggttttaccggcggtttgcagcgcacgcagcgcgcccagcgccatttcatcgttctgggcaaataccgcctgcacatccgggtgagcggtcagcaggttctgcatcacgttcaggcccttggtgcggtcgaaatcggccggctggctggccagcagcttgaatttattctgatccagcgactgtttgaagccttcgccgcgttcacgcgcggcggaggtgccggcaatgccttccagctgaatcaccttggcgtcggcgcctgctttcttggcgatgaagtcgccggccattttgccgcccacgcggttatccgacgcgatgtggctcaccacttcacccttgctcgccacgcggtccagcgtgatgaccgggatcttagcctggttggccatcttgatggcgttgccgaccgcatcggagtcggtcgggttgatcagcagcagcttaggcgcccgcaccatcagatcctgcacgttggccagctctttcgccgggttgttctgggagtccagcaccaccaggttgtagcccagcttattggcctcttgctgcgctccgtccttcatcgagacgaagaacgggttgttgagagtggacaccaccagcgcgatggtctctttggccatggcattggcgctcagggtggcgctcagcgcgatggcggaggctaaggttgccagttttttcattttcatcatcgtgattcctgtagggggaggttacttgttgcttttgttatctaccagaaccgccagcagtatcaccactgccttcacgatcatttggtagtaggaagaaacacccaataaattcaggccgttgttcaggaagccgaggatcagcgccccgatcagcgtgccgacgatgcgccccttgccgccggccaggctggtgccgcccagcaccacggcggcgatggcgtccagctcatagccggtgccggcggtcggctgcgccgacgagaggcgcgctacttcgatcacccccgccagcgccgccagcaggccgcacagcgaatagacgataattttcactttatcgacgctgataccggacaggcgtgtcgccgcttcattgccgcccagggcataaatatagcggcccaggcgcgtatggtgcagcatataccaggcggcgatgaacacgatcgccatgatccagatcggcgtaggcacacccagcggacggccgatgccgaaccaaccaaaggtgtcggccacgtcggtgaaaccggtattgatcgggctgccgttggtgtacaccatggtgacgccgcgcagcagcagcatcatcaccagcgtagcgataaaggcttgcactttgcctttggcgacgatcaccccggtgcaggcgccaaccgcggcgcccagcgccaaggccgccgccaccgccaccagcgcgttgacctcaaagccgacgatcgacgccgccaccgcgccggtcagggccagcagcgatcccaccgacagatcgatgccggaagtgaggatcaccagcgtcatccccaccgccatgatggcgttgaccgaggtctgctgcagaatattgaacaggttgttcagggtgaagaagttcgggctcatggaagagaccacggcgatcagcaccagcagcgcaatcaacgacttctgctctaacagccattctttactgaaccagcgcttagctgcgatagtctgggaactcatatctgattactcctgctttacgccgtattgcttgccgacggctgccgccatcaacgcttcctgggtggcctgttcaatcgggaactcgccgctgagatgcccttcgtgcatcaccagaatgcgatcgctcatgcccatcacctccggcatttccgaagacaccagaatgatgctcagcccttcctgcttgaactggttgattaactgatagatctcttttttcgccccgacatcgacgccgcgcgtcggctcatcgaggatcagcaccttcggccgggtcatcaggccgcgggcgatcgccactttctgctgattgccgccggaaagcagacctatcggctgctccatcgacggcgttttgatattgaacaggcggatgaaatctcccaccgcctgccgctcgtcggcctgtttcaggctgccgtcggcgcggctgaagtagcgcagcgcggtcagagacatgttttccttcaccgacatgcccagcaccaggccgtcgcgcttgcggtcttccgagatatagacgatgccgttcgccaacccatcctgcggcgaatgggcgaccacctcgcggccgtccaggctgacggtgccggccttgcgcggcgcggcgccgtacaggatcttcatcaattcggtgcgcccggcgcccatcagcccggccacgccgaggatctcgccgcggtacagcgtaaagctgacgtcttcaacgccggggccggaaagatgactgacttccagccgcttttcaccacgcggcaaatccaggcgcggatattgttcttccagcttgcggccgaccatcatctcaatcagcgaatcttcctgcagctcgctcaccggccgctcggcgataaactgcccgtcgcggaacacggtcacgtcgtcgcagatttcaaagatctctttcagacggtgcgagatatagacgatgccgcgcccttcggccttcagctcattaatcaccttgaacagcgaggcggtttcggtgtcggtcagcgcatcggtcggttcgtccatgatgatcactttcgattcgaagctcagcaccttggcaatctccaccatctgctgatcgccgatcgacagctcgcccaccagccggtggctgctgtagcgcagattgaggcgcgccagcaagcgatcggcctcggcgtacatgcgcttccagtcaatgcggccgaaacggttgacgaactcgcggccgaggaagatgttttccgcaatcgtcagctgcgggatcaggttcagctcctgatgaataatgccgatgcccgcttcctgcgaatcctttggcccgttgaacgccacctctttaccgagaaaatactggctgccggcgtctttctggtagatgccggtcagcactttcatcatggtggacttcccggcgccgttttcccccaccagcgccatcaccttgccgggataaacgctgagggcagcgccggaaagcgccttcacgccgggaaaggctttatcaatccctttcagttgcagtaaaggttgcataaacgcctcagaaagttacgccggcgcacaggatcacgttcgcgtaaggcgaacactccccgctgcggatcaccgcccggctgtgctcggtttgcgctttaaacgcctgatggctgatatagcgcacgctgatggtattgccctggcgttggcccagtgcggtcagttcagccaacagagcctcgtggagcgacggattctgtttcacgatctcttccgccaggatggcgctttctacctgcatctcttgcgtgaccgccgcgaacacctgcatgaaggtcggcacgccctgcgtcaacgccagatcgatgcgctgcgtcgccgccggtatcggcaggcccgcatcgcacagggtgagctggtcggtatgccccagccgggcaatcacggcagacacgtcggaattcagtaatacgccttttttcatcttctcactccgctagcgaaacgtttcgctctctggaggagtgtaaaaaaacggcaggggaaggcaaccgggacaatgcagaagtgtgatcgttatcgaaacgtttcgttcacgcacggagaaagcgcaaacaaaaggggctcagccatgctgagcccctgtcaggcggattagatctcgacctgcgtaccgagttcgatgacccggttcggcgggatttcgaactgatccggcgcgcgcagggcattgcggctcagggcgacgaacagtttgccgcgcaggtagaggtaccacggccgcttggtgaggatcagcgattcatgggacatgaagaacgacgtctccgacatgcggcacggcaacccttccagcccgcagcggtggaacacttcctcgacgttcggcgtttcgcgccagccgtagctggccaccacccgccagaaggtcggcgacagctgctcgatggtcacccggcgcacgttgtgcacgtaaggcgcatcctcggtgcgcagcgtcagcagcaccacgcgctcgtgcagcaccttgttgtgcttcaggttgtgcaacagcgcaaaaggaatgacgttggtggcgcgcgacaagaagaccgcggtgcccggcacccgtaccggcggcgatttctccagcgaggcaatcatcgcctccagcgagttgccgtgttcatgcaggcggcgcagcaagcggaagcgctcgctcttccaggtagtcataatgatgaacatcaccagcgccagggtcagcggcagccagccgccggagaacagcttcagggcgttggcagagaacatcggcacgtcgatgatcagcaagatggttacgatgccgatcgccaggaagcggttccagtgccagttattaatcgccaccgaagtgaccagaatgctggtcagcaccatggtgccggtgacggcgataccgtacgccgccgccaggttgctggagtgctcgaagccgatgatcaccagcaccaccgagatgtacagcgtccagttgatcaccggaatgtagatctggccggattccatttccgaggtgtgaatgatgcgcatcggcgacagatagcccaggcgcaccgcctggcgagtcagcgagaagacgccggaaatcaccgcctgcgaagcgatcaccgtcgccagggtcgccagaatcagcagcgggatcagcgcccaatcgggcgccagcaggaagaacgggtttttgatcgcctccggatttttcagcagcagcgcgccctggccgaaatagttgagcaccagcgaaggcagcaccacggtgaaccaggccaggcggatcgggaacttgccgaagtgccccatgtcggcatacagcgcctcaacgccggtgatcgacagcaccaccgcacctaacgcaaagaacgataccttcttatattccataaagaagttgagcgcccatttggggttcagcgcctgcagcacttccgggttcgatatgatgctgcgcgcgcccagcaccgccaacacgatgaaccacagcagcatcaccggggcgaacagcttgccgacgctgccggtgccgtgcttttgaatgacgaacagcagcgtcaacaccagaatggagagcggcacgatataggcatcgagcgcaggggcggcgatttccaacccttctatcgccgacatcaccgagatcgccggggtgatcaccacctcgccatagaagaagctgccgccgatcagacccagtatcaccagcaccgccgtggtgcgcgccgaggtattgcgcccggccagcgacatcagcgtcagaataccgccctcgccggcgttatccgcgcgcatcacgtaggtgagatatttgagggaaacgatcacgatcagcatccagaaaatcagcgacaggaagccgaaaaccacgtctggacgaacatcgaagccgtaatggccggagaaacactctctcagcgtatagagagggctggtgccaatatcaccgtagaccacgccgatggcagccagggttaccgccgataaggactgcttatgctctgcgctcataattcgtttctttatcagaacatccgttagcgatgcatccgcatcaggcaaaatacgggctcaaagatccgtcacgcccaccagaaagccgcacagtatgcaccatttataccgcttgcctacccttatatcagagccgaaaaataaacaaaatgtgaaccgaatatccggcttaacgtagaaaaatattactaatcaacgggctataccactaaaaataatggtggtttatcatcggattatcgaccaagattggctaactctcggacaatgcgacaattatatgacgccatcatcccttctggcagaacgaatttcccgcctcagcagcgcgctggagagcggtctttatgagcggcaagaggcaatccgtctgtgcctgctggcggcgctgagcggcgaaagcgtattcctgctcggcccacccggcatcgccaagagcctgatcgcgcgccggttgaagtttgccttccgcaacgcccgctcctttgaatacctgatgacgcgtttttccacgccggaagaggtcttcggcccgctctctatccaggcgctgaaagatgaggggcgctatcagcgtctgaccgccggctatctgccggaagcggagatcgtgtttctggacgagatctggaaggccggcccggcgatcctcaacaccctgctgacggcgatcaacgaacgccgctttcgcaacggcaacagcgaagaaccgatcccgctgcgcctgctggtcaccgcctccaacgaactgcccgaagcggacagcagcctcgaagccctgtatgaccgcatgctgatccgcctgtggctggacaaggtgcaggataaacagaatttccgctcgctgctggtcaaccgccagagcgaaagccaaaacccggtgccggcggcgctgagcatcagcgacgaagagtttctgcagtggcagccgcagatcgataaggtggcgctgccggaagcctgctttgagctgattttccaactgcgccagcggctggacgcgctggaacaggcgccgtacgtctccgatcgacgctggaaaaaagccctgcgcctgctgcaggcctgcgccttcttcagcgggcgcgacgccatcgccccgctcgatctgatgctgttgaaggactgcctgtggcacgatctcacctcgctgaaactgctgcaacagcagatcgatcagctgctgaccgagtcggcctatcagcagcagtcgatgctgatccagttgcaacaaatccacacccgctggctgcaggaccagcagcaacaaagcgaccggcaggccatcagcctggtgaaaaaaggcggcatgttcagccgcaaaccgcaatacgcgccggccacgccgttcgccggcggccccctcactctgctgttgcaaaagccgctgcagctgcatgacattcaggtcaaccatctgagcatcgaaagcagcgcgctggacaactggctgcaaaaaggcggcgacgtgcgcgccaagctgaacggcatcggctttgcgcagccgatcgacctggaagtggatgaccaactgcacctcacggtgttggacgtcagccgccagccgtcattactggcgctgccgggcaaacaggccaccgccacgccgcaggcgctgctggatgaaatggacggattggcccagcgcctggcggagcaacgccgcgccttcagccaacatcagccctgtctgttcacccccgccgccggcctggccaagatcgaagccagtctgctgcaggtcgcggaacaggttaaacagcaactgcagcaaatgcgcggccagtaaccatgctcagtctggagacgctcgatctgctgctggcgatcaccgaaggcgagatgatcgaggagatgatcgtcggcatgctggcggcgccgcagctgtcggtattctttaaaaagtttccggcccttcgccgggcgctggatcgcgatctgccgcgttggaagctgcagctcaaggagcgtctgcaggaggcgatggtgccgccggcgctggcgcaggaattctatcgctaccagcagtgccagctggagaacaacacccagttttatcacaacctcaacgacaccatggagctgctgcgccagctggtctcaccgttttatgaacaggcgcgcgcgctggtggacgccgccgatctgcccaatcatccgctggacgacagctttcaaacgctgtttctgcagcgctggcgcatcagcctgacgctacaggccaccatgctgcaccaccaactgctggaacaagagcgcgagcagctgatggcggaactgcaggagcggttggcgctgagcggcgcgctggaaccgctgctgtcggaaaacgacaccgccgccggcaggctgtgggacatgagcaaaggccagctgcagcgtggcgattatcagcggctggtggagtacggcaactttttgcagcagcagccggagctgaaaaaactggcgcaacagctgggccgcagctatcaggccaaggcggtgcagcaacaggacgcgcagccggagccgttcagggtcatggtgcaggtgccggccacgctgccggaagaagtgagcggcattcatcagagcgacgacattctgcgcctgctgccgccggagctggcgacgctggggatagaagagctggaattcgagttttatcgccgcctgttggaaaagcggctgctgagctaccgtctgcagggcgacgtctggcaggaacagatcctgatccgccaggtcactcaccagcagcaggatcaacagccgcgcgggccgtttatcgtctgcgtggacacctccggatcgatgggcggtttcaacgaacagtgcgccaaggcgttctgtctggcgctgctgcgcattgcgctggcggacaaccgccgctgctatatcatgctgttcgccaaccagatcgtgcattacgaactcaccgccgccagcggcatcgagcaggcagtgcgctttctcggccagcagtttcgtggcggcaccgatctggcggcctgcctgaacgccaccgtcaccaaaatggcggagagcggctggttcgacgccgatgcggtgatcatttccgattttattgcccagcggttgccggaggaggtaataaagaaggtgaaacagcagcagcaaagccaccagcaacgtttccacgcggtggcgatgtccgcctacggcaaacccggcatcatgcgcatcttcgatcatatctggcgctttgataccgggctgaaaagccgtttgatgcgccgctggcggcgctaggcgggattagagcagaccttcaaccgcgccgcgcacttccggcgaccacacgccgcattgcacctggccgatatgcgacagttgcagcaacaacatcaccagacgcgactgaccgatgccgccgccgatggtctgcggcatatcgccgcgcagcaaggactggtgccattccaacgccatgcgctcttcatcgccggtcagcgccagctggtgtttcagcgcggcggcgtcaacgcggatccccatggaggacagctcgaaagcgtcctgcagcaccgggttccacaccacgatatcgccgttcaggcccgccaggccatccgccgtcggcgtggtccagtcatcataatccggcgcccgcacatcgtgcgatttaccgtgtgacagcttgccgccgatgccaatcaggaacactgcgcccaattctttggcgatcgcccgctcgcgccccttggcgtccagatccggatagcgctgcagcagggtttcgctgtgcacgaagtggatctgttccggcaggaacggggtcaggccatgctcgcggctgacttccgcctccgtcgccttgatcgcagcgtaaatgctgcgcacggtgtttttcaggtagtccaggctgcgttcaccatcgcccatcacccgttcccagtcccactgatcgacgtacaccgagtggataggcgtcaggcggtcttcatccgggcgcagcgccttcatatgggtatacaggccttcgccggcaccgaaatcgtagctacccagggttttgcgtttccatttcgccagcgaatgcaccacttcgaaggtggcgtccggcaaggttttgactttgacctgcaccgctttctcgctgccggaaaggttatcctgcgtgccatcgcccaggcggctaaggatcggggcttgcacttcgatcagaccgagctgttgctccagctggcgggagaagaaggatttgacctggctgatttgttgttgtttttggataaactgttttttcattgccgtatctcttgtaaacctgtctctgttgccatcgattaagcaacaaaatgacacaacaattcaatatccattaatcaatattgccttttcacttttaatcgttcatttttacccggacagaattcaacaatcgttaattaatgggggattaaatggcggaaatttatcagatcgataatctcgatcgcggcattctcaacgccctgatggacaatgcgcgcacaccgtacgccgaactggcgaaaaacttcgccgtcagccccggcaccattcatgtgcgggtggagaagatgaagcaggccgggatcatcaccggcgcgcgcatcgacgtcagccccaaacagctgggctacgacgtgtgctgctttatcggcatcatattaaagagcgccaaggattacccttcggcgctgaagaagctggaaagcctggaagaagtggtggaagcctattacaccaccggccactacagcgtctttattaaagtcatgtgccgctcgatcgacgcgttgcagcaagtacttatcaacaagatccagaccatcgacgagatccagtccaccgaaacgctgatctcactgcagaaccccattatgcgcaccatcgtgccgtaacccgccaaattgcatacccacattatccacaggtagatcccagccgattcacagcgtacaatgcagccactttgagtgagaaggttgggatcgttggttcatggcagacattactctgatcagtggcagtacgcttggcagtgccgaatacgtggctgaacatttggctgaaaagctggaagacgccggcttctctaccgagatgctgcacggccctgaactggatgaactgccgttgaacggccgctggctggtggtctcttccacgcacggcgccggcgaactgccggataaccttcagccgctgttggaacagatcgctgagcagcagccggatctttccgaggtgcagttcggcgccgtcggtttgggcagttcggaatacgacaccttctgcggcgcgatcaaacagatcgacgatctgttgatcgccagaggcgctaaaaggatcggcgatcgtctcgagatcgacgtgaccgagcatgaaattcccgaggatccggccgaggaatgggtaaaaaactggattaatttactctaattcgtctaaagatcgcgcgaacgattgtggataactaagcttaaaagcagggtaaaagccgtagttatcccaataacaaccgtagagcgctttttgtcctgtgcataacaagccttttagatcccagcttatctgcgtcgggatcaccgatcattcacagcaaacgatcctccttaatctgctgatcttcatcgtgaatagtcacttatccacagaggatctcgatcctaataagagatctaataaagagatctttaaataaaaaagatcttcttttaattaccgacgatcctgaccacttggtcgatcgtctaaacttgagtagaatccccgaccccagggcaaatacgatcgttcgcaatacggcgaggtgcagttccatgttttatccagatcaatttgacgtcatcatcatcggtggtggccatgcaggtaccgaggccgccatggccgcggcgcgcatgggacgtcagactttattattgacacacaatatcgatacgctgggacagatgtcctgtaacccggcgattggcggtattggtaaagggcatctggttaaggaaattgatgcgctcggcggcctgatggcaacggcgatcgaccatgccggcatccagtttaggatactaaacgccagcaaaggccctgctgttcgcgccactcgggctcaggcggatcgcgtcctgtatcggcaggcgatccgtaccgcgttggagaaccagcccaacctgatgatcttccaacagccggttgaggatctgatcgtcgaaaacgatcgcgtcgtgggcgccgtcacccaaatgggtctgaaattccgcgccaaggcggtggtattgaccgtaggcaccttcctggacggcaagatccatatcggtctggagaattacagcggcggccgcgccggggatcctccttcgatctcgctgtcacagcgtttgcgtgaactgccgctgcgcgttaaccgcttgaaaaccggtacgccgccgcgcatcgacgcccgcactatcgatttcagcgtattggcacctcaacacggcgatacgccggtgccggtattctcgttcctgggcgatgccagccagcacccggaacaaatggcgtgctacatcacccacaccaatgaaaaaacccatgacgtgatccgcaataacctcgatcgcagcccgatgtatgccgggatcatcgaagggatcggcccacgttactgtccgtcgatcgaagacaaggtcatgcgttttgccgatcgcaacgcgcaccagatcttccttgagccggaaggcctgaccagcaacgagatttaccctaacgggatctccaccagcctgccgttcgacgtgcagatgcagatcgtccgttcaatggaagggatgcagaacgcgcgtattattcgccctggttatgccatcgagtacgatttcttcgatccacgcgatctgaaaccgacgctggaaagtaaatttattcagggcctgttcttcgccggccagatcaacggcaccaccggctatgaagaagccgccgctcagggcctgctggccggtctgaacgccggccgcttcgccgatgaacaagagggctgggcgccacgtcgcgatcaggcctacctcggcgtgctggtggacgatctcagcaccctcggcaccaaagaaccgtaccgcatgtttacctcacgcgccgagtatcgtctgatgctgcgcgaagacaacgccgatctccgcctgacggaaaaaggccgtgaactcggtctggtggacgacgtgcgctgggcgcgctacagcgaaaagctggagcggatcgaacgtgaacgtcagcgcctgcgcgacatctggatgcacccgcatgccgagaacgtcgaacaggtcaatgcgttgctgaaagcgccgctgtcgcgtgaagcgaacggcgaagagttgctgcgccgtcctgagatggattacgcgcaattgaccggcatcgacgccttcgcgccgccgttggacgacgaacaagccgccgagcaggtcgagatccaggtcaaatacgaaggctatatcgctcgccagcaggaagagatcgaaaaacagcagcgcaacgagaacaccgtgctgccgctggatcttgactaccgtcaggtttcggggctgtcgaacgaagtgatcgccaagctgaacgatcacaaaccgaactccatcggccaggcttcgcgcatctccggcattacaccggcggcgatctcgattttgctgatctggctgaaaaagcagggactgctgcgccgcagcgcataaatcccgcatccaggcggccgtttgctcaacccgtagccaaacggccgctgacatcacttgcgccctgaattatcatagtcgcctcattgcgccagctaaccatccgctggtcgttcagcgcctgccagaggatccgttgtgcaaaaaaaattagactcgctgctcgcggcagcaggcattgagctgcccgatcagcagaaacagcagctgctgggctatgtcggcatgctggataagtggaacaaggcttataacctcacgtcggtgcgcgatccgcagcaaatgctggtgcgccacatcctcgacagtattgtggtcaatccgcatctgcagggctcgcgttttatcgatgtcggcaccggccccggcttgccgggcattccgctggcgattgtgcgcccggatgcgcatttcacgctgctcgacagcctgggcaagcgcgtgcgtttcctgcgccaggtgcagcatgagctgggcctgaacaatatcgagccggtgcagagccgcgtcgaagcgtttccggccgagccaccgttcgatggcgtgatcagccgggcattcgcttcgctgcaggatatgctgtcctggtgccatcacctgccggcgaaagggcaggggcgtttttacgcgttgaaaggcgtgcgcccggatgaagaactgacgcagctgccggctggcgttagcctggagtctatcgtgcggctgcaggtgcctgaactggaaggcgaacgtcatctggtgattcttaaggcaaactgagtttgcttttgatcaaacaagcgtgaattaaaggtcgtacccagcagaaagataagcaggctaattagttggtcgc
